(19) United States
(12) Patent Application Publication
(10) Pub. No.: US 2021/0371523 A1
(43) Pub. Date: Dec. 2, 2021

(54) ANTIBODY MOLECULES THAT BIND TO NKP30 AND USES THEREOF

(71) Applicant: Marengo Therapeutics, Inc., Cambridge, MA (US)

(72) Inventors: Andreas Loew, Boston, MA (US); Nidhi Malhotra, Boston, MA (US); Madan Katragadda, Acton, MA (US); Brian Edward Vash, Cambridge, MA (US); Stephanie J. Maiocco, Arlington, MA (US)

(21) Appl. No.: 17/402,320

(22) Filed: Aug. 13, 2021

Related U.S. Application Data
(63) Continuation of application No. PCT/US2020/019329, filed on Feb. 21, 2020.
(60) Provisional application No. 62/808,582, filed on Feb. 21, 2019.

(51) Int. Cl. C07K 16/28; A61K 45/06; A61K 39/395

(52) U.S. Cl. CPC C07K 16/2803; A61K 45/06; A61K 39/3955; C07K 2317/24; C07K 2317/31; C07K 2317/52; C07K 2317/565

(57) ABSTRACT

Antibody molecules that specifically bind to NKp30 are disclosed. The anti-NKp30 antibody molecules can be used to treat, prevent and/or diagnose cancerous, autoimmune or infectious conditions and disorders.

### RELATED APPLICATIONS

[0001] This application is a continuation of International Application No. PCT/US2020/019329, filed on Feb. 21, 2020, which claims the benefit of U.S. Provisional Application 62/808,582 filed Feb. 21, 2019, the entire contents of each of which are hereby incorporated by reference.

### SEQUENCE LISTING

[0002] The instant application contains a Sequence Listing which has been submitted electronically in ASCII format and is hereby incorporated by reference in its entirety. Said ASCII copy, created on Feb. 20, 2020, is named 53676-735.301_SL.txt and is 517,567 bytes in size.

### BACKGROUND

[0003] Natural Killer (NK) cells recognize and destroy tumors and virus-infected cells in an antibody-independent manner. The regulation of NK cells is mediated by activating and inhibiting receptors on the NK cell surface. One family of activating receptors is the natural cytotoxicity receptors (NCRs) which include NKp30, NKp44 and NKp46.

[0004] Given the importance of immune checkpoint pathways in regulating an immune response, the need exists for developing novel agents that modulate the activity of immunoinhibitory proteins, such as PD-1, thus leading to activation of the immune system. Such agents can be used, e.g., for cancer immunotherapy and treatment of other conditions, such as chronic infection.

### SUMMARY OF THE INVENTION

[0005] Disclosed herein are antibody molecules (e.g., humanized antibody molecules) that bind to NKp30 with high affinity and specificity. Nucleic acid molecules encoding the antibody molecules, expression vectors, host cells and methods for making the antibody molecules are also provided. Multi- or bispecific or multifunctional antibody molecules and pharmaceutical compositions comprising the antibody molecules are also provided. The anti-NKp30antibody molecules disclosed herein can be used (alone or in combination with other agents or therapeutic modalities) to treat, prevent and/or diagnose disorders, such as cancerous disorders (e.g., solid and soft-tissue tumors), as well as autoimmune and infectious diseases. Thus, compositions and methods for detecting NKp30, as well as methods for treating various disorders including cancer, autoimmune and/or infectious diseases, using the anti-NKp30 antibody molecules are disclosed herein.

[0006] Accordingly, in one aspect, the invention features an antibody molecule (e.g., an isolated or recombinant antibody molecule), comprising one or more sequences according to the following enumerated embodiments. Additional features of any of the disclosed antibody molecules, multifunctional molecules, nucleic acids, vectors, host cells, or methods include one or more of the following enumerated embodiments.

[0007] Those skilled in the art will recognize, or be able to ascertain using no more than routine experimentation, many equivalents to the specific embodiments of the invention described herein. Such equivalents are intended to be encompassed by the following enumerated embodiments.

### Enumerated Embodiments

[0008] 1. An isolated antibody molecule that binds to NKp30, comprising:

(i) a heavy chain variable region (VH) comprising a heavy chain complementarity determining region 1 (VHCDR1) amino acid sequence of SEQ ID NO: 7313 (or a sequence with no more than 1, 2, 3, or 4 mutations, e.g., substitutions, additions, or deletions), a VHCDR2 amino acid sequence of SEQ ID NO: 6001 (or a sequence with no more than 1, 2, 3, or 4 mutations, e.g., substitutions, additions, or deletions, and/or a VHCDR3 amino acid sequence of SEQ ID NO: 7315 (or a sequence with no more than 1, 2, 3, or 4 mutations, e.g., substitutions, additions, or deletions; and/or
(ii) a light chain variable region (VL) comprising a light chain complementarity determining region 1 (VLCDR1) amino acid sequence of SEQ ID NO: 7326 (or a sequence with no more than 1, 2, 3, or 4 mutations, e.g., substitutions, additions, or deletions), a VLCDR2 amino acid sequence of SEQ ID NO: 7327 (or a sequence with no more than 1, 2, 3, or 4 mutations, e.g., substitutions, additions, or deletions), and/or a VLCDR3 amino acid sequence of SEQ ID NO: 7329 (or a sequence with no more than 1, 2, 3, or 4 mutations, e.g., substitutions, additions, or deletions).

[0009] 2. The antibody molecule of embodiment 1, wherein the antigen binding domain comprises:

(i) a VH comprising the amino acid sequence of any of SEQ ID NOs: 7298 or 7300-7304 (or an amino acid sequence having at least about 75%, 80%, 85%, 90%, 95%, or 99% sequence identity to any of SEQ ID NOs: 7298 or 7300-7304), and/or
(ii) a VL comprising the amino acid sequence of any of SEQ ID NOs: 7299 or 7305-7309 (or an amino acid sequence having at least about 93%, 95%, or 99% sequence identity to any of SEQ ID NOs: 7299 or 7305-7309).

[0010] 3. The antibody molecule of embodiment 2, wherein the antigen binding domain comprises:

(i) a VH comprising the amino acid sequence of SEQ ID NO: 7302 (or an amino acid sequence having at least about 75%, 80%, 85%, 90%, 95%, or 99% sequence identity to 7302), and a VL comprising the amino acid sequence of SEQ ID NO: 7305 (or an amino acid sequence having at least about 75%, 80%, 85%, 90%, 95%, or 99% sequence identity to 7305); or
(ii) a VH comprising the amino acid sequence of SEQ ID NO: 7302 (or an amino acid sequence having at least about 75%, 80%, 85%, 90%, 95%, or 99% sequence identity to 7302), and a VL comprising the amino acid sequence of SEQ ID NO: 7309 (or an amino acid sequence having at least about 75%, 80%, 85%, 90%, 95%, or 99% sequence identity to 7309).

[0011] 4. The antibody molecule of any of embodiments 1-3, wherein the antigen binding domain comprises:

(i) an amino acid sequence of SEQ ID NO: 7310 (or an amino acid sequence having at least about 75%, 80%, 85%, 90%, 95%, or 99% sequence identity to 7310); or
(ii) an amino acid sequence of SEQ ID NO: 7311 (or an amino acid sequence having at least about 75%, 80%, 85%, 90%, 95%, or 99% sequence identity to 7311).

[0012] 5. An isolated antibody molecule that binds to NKp30, comprising:

(i) a heavy chain variable region (VH) comprising a heavy chain complementarity determining region 1 (VHCDR1) amino acid sequence of SEQ ID NO: 6000 (or a sequence with no more than 1, 2, 3, or 4 mutations, e.g., substitutions, additions, or deletions), a VHCDR2 amino acid sequence of SEQ ID NO: 6001 (or a sequence with no more than 1, 2, 3, or 4 mutations, e.g., substitutions, additions, or deletions), and/or a VHCDR3 amino acid sequence of SEQ ID NO: 6002 (or a sequence with no more than 1, 2, 3, or 4 mutations, e.g., substitutions, additions, or deletions), and
(ii) a light chain variable region (VL) comprising a light chain complementarity determining region 1 (VLCDR1) amino acid sequence of SEQ ID NO: 6063 (or a sequence with no more than 1, 2, 3, or 4 mutations, e.g., substitutions, additions, or deletions), a VLCDR2 amino acid sequence of SEQ ID NO: 6064 (or a sequence with no more than 1, 2, 3, or 4 mutations, e.g., substitutions, additions, or deletions), and/or a VLCDR3 amino acid sequence of SEQ ID NO: 7293 (or a sequence with no more than 1, 2, 3, or 4 mutations, e.g., substitutions, additions, or deletions).

[0013] 6. The antibody molecule of embodiment 5, wherein the antigen binding domain comprises:

(i) a heavy chain variable region (VH) comprising a heavy chain complementarity determining region 1 (VHCDR1) amino acid sequence of SEQ ID NO: 6000, a VHCDR2 amino acid sequence of SEQ ID NO: 6001, and/or a VHCDR3 amino acid sequence of SEQ ID NO: 6002, and
(ii) a light chain variable region (VL) comprising a light chain complementarity determining region 1 (VLCDR1) amino acid sequence of SEQ ID NO: 6063, a VLCDR2 amino acid sequence of SEQ ID NO: 6064, and/or a VLCDR3 amino acid sequence of SEQ ID NO: 7293.

[0014] 7. The antibody molecule of embodiment 5 or 6, wherein the antigen binding domain comprises:

(1) a heavy chain variable region (VH) comprising a heavy chain framework region 1 (VHFWR1) amino acid sequence of SEQ ID NO: 6003 (or a sequence with no more than 1, 2, 3, 4, 5, or 6 mutations, e.g., substitutions, additions, or deletions, therefrom), a VHFWR2 amino acid sequence of SEQ ID NO: 6004 (or a sequence with no more than 1, 2, 3, 4, 5, or 6 mutations, e.g., substitutions, additions, or deletions, therefrom), a VHFWR3 amino acid sequence of SEQ ID NO: 6005 (or a sequence with no more than 1, 2, 3, 4, 5, or 6 mutations, e.g., substitutions, additions, or deletions, therefrom), or a VHFWR4 amino acid sequence of SEQ ID NO: 6006 (or a sequence with no more than 1, 2, 3, 4, 5, or 6 mutations, e.g., substitutions, additions, or deletions, therefrom), and/or
(2) a light chain variable region (VL) comprising a light chain framework region 1 (VLFWR1) amino acid sequence of SEQ ID NO: 6066 (or a sequence with no more than 1, 2, 3, 4, 5, or 6 mutations, e.g., substitutions, additions, or deletions, therefrom), a VLFWR2 amino acid sequence of SEQ ID NO: 6067 (or a sequence with no more than 1, 2, 3, 4, 5, or 6 mutations, e.g., substitutions, additions, or deletions, therefrom), a VLFWR3 amino acid sequence of SEQ ID NO: 7292 (or a sequence with no more than 1, 2, 3, 4, 5, or 6 mutations, e.g., substitutions, additions, or deletions, therefrom), or a VLFWR4 amino acid sequence of SEQ ID NO: 6069 (or a sequence with no more than 1, 2, 3, 4, 5, or 6 mutations, e.g., substitutions, additions, or deletions, therefrom).

[0015] 8. The antibody molecule of embodiment 7, wherein the antigen binding domain comprises:

[0016] (1) a heavy chain variable region (VH) comprising a heavy chain framework region 1 (VHFWR1) amino acid sequence of SEQ ID NO: 6003, a VHFWR2 amino acid sequence of SEQ ID NO: 6004, a VHFWR3 amino acid sequence of SEQ ID NO: 6005, or a VHFWR4 amino acid sequence of SEQ ID NO: 6006, and

(3) a light chain variable region (VL) comprising a light chain framework region 1 (VLFWR1) amino acid sequence of SEQ ID NO: 6066, a VLFWR2 amino acid sequence of SEQ ID NO: 6067, a VLFWR3 amino acid sequence of SEQ ID NO: 7292, or a VLFWR4 amino acid sequence of SEQ ID NO: 6069.

[0017] 9. The antibody molecule of any one of embodiments 5-8, wherein the antigen binding domain comprises:

(i) a VH comprising the amino acid sequence of SEQ ID NO: 6121 (or an amino acid sequence having at least about 75%, 80%, 85%, 90%, 95%, or 99% sequence identity to SEQ ID NO: 6121), and/or
(ii) a VL comprising the amino acid sequence of SEQ ID NO: 7294 (or an amino acid sequence having at least about 93%, 95%, or 99% sequence identity to SEQ ID NO: 7294).

[0018] 10. The antibody molecule of any one of embodiments 5-9, wherein the antigen binding domain comprises a heavy chain comprising the amino acid sequence of SEQ ID NOs: 6148 or 6149 (or an amino acid sequence having at least about 75%, 80%, 85%, 90%, 95%, or 99% sequence identity to SEQ ID NOs: 6148 or 6149).

[0019] 11. The antibody molecule of either of embodiments 5-10, wherein the antigen binding domain comprises a light chain comprising the amino acid sequence of SEQ ID NO: 6150 (or an amino acid sequence having at least about 75%, 80%, 85%, 90%, 95%, or 99% sequence identity to SEQ ID NO: 6150).

[0020] 12. The antibody molecule of either of embodiments 5-11, wherein the antigen binding domain comprises a heavy chain comprising the amino acid sequence of SEQ ID NOs: 6148 or 6149 (or an amino acid sequence having at least about 75%, 80%, 85%, 90%, 95%, or 99% sequence identity to SEQ ID NOs: 6148 or 6149), and a light chain comprising the amino acid sequence of SEQ ID NO: 6150 (or an amino acid sequence having at least about 75%, 80%, 85%, 90%, 95%, or 99% sequence identity to SEQ ID NO: 6150).

[0021] 13. The antibody molecule of any of embodiments 5-12, wherein the antigen binding domain comprises a heavy chain variable region (VH) comprising a heavy chain framework region 1 (VHFWR1) amino acid sequence of SEQ ID NO: 6014 (or a sequence with no more than 1, 2, 3, 4, 5, or 6 mutations, e.g., substitutions, additions, or deletions, therefrom), a VHFWR2 amino acid sequence of SEQ ID NO: 6015 (or a sequence with no more than 1, 2, 3, 4, 5, or 6 mutations, e.g., substitutions, additions, or deletions, therefrom), a VHFWR3 amino acid sequence of SEQ ID NO: 6016 (or a sequence with no more than 1, 2, 3, 4, 5, or 6 mutations, e.g., substitutions, additions, or deletions, therefrom), or a VHFWR4 amino acid sequence of SEQ ID NO: 6017 (or a sequence with no more than 1, 2, 3, 4, 5, or 6 mutations, e.g., substitutions, additions, or deletions, therefrom).

[0022] 14. The antibody molecule of embodiment 13, wherein the antigen binding domain comprises a heavy chain variable region (VH) comprising a heavy chain framework region 1 (VHFWR1) amino acid sequence of SEQ ID NO: 6014, a VHFWR2 amino acid sequence of SEQ ID NO: 6015, a VHFWR3 amino acid sequence of SEQ ID NO: 6016, or a VHFWR4 amino acid sequence of SEQ ID NO: 6017.

[0023] 15. The antibody molecule of embodiment 14, wherein the antigen binding domain comprises a VH comprising the amino acid sequence of SEQ ID NO: 6123 (or an amino acid sequence having at least about 75%, 80%, 85%, 90%, 95%, or 99% sequence identity to SEQ ID NO: 6123).

[0024] 16. The antibody molecule of any of embodiments 5-15, wherein the antigen binding domain comprises a heavy chain variable region (VH) comprising a heavy chain framework region 1 (VHFWR1) amino acid sequence of SEQ ID NO: 6018 (or a sequence with no more than 1, 2, 3, 4, 5, or 6 mutations, e.g., substitutions, additions, or deletions, therefrom), a VHFWR2 amino acid sequence of SEQ ID NO: 6019 (or a sequence with no more than 1, 2, 3, 4, 5, or 6 mutations, e.g., substitutions, additions, or deletions, therefrom), a VHFWR3 amino acid sequence of SEQ ID NO: 6020 (or a sequence with no more than 1, 2, 3, 4, 5, or 6 mutations, e.g., substitutions, additions, or deletions, therefrom), or a VHFWR4 amino acid sequence of SEQ ID NO: 6021 (or a sequence with no more than 1, 2, 3, 4, 5, or 6 mutations, e.g., substitutions, additions, or deletions, therefrom).

[0025] 17. The antibody molecule of embodiment 16, wherein the antigen binding domain comprises a heavy chain variable region (VH) comprising a heavy chain framework region 1 (VHFWR1) amino acid sequence of SEQ ID NO: 6018, a VHFWR2 amino acid sequence of SEQ ID NO: 6019, a VHFWR3 amino acid sequence of SEQ ID NO: 6020, or a VHFWR4 amino acid sequence of SEQ ID NO: 6021.

[0026] 18. The antibody molecule of embodiment 17, wherein the antigen binding domain comprises a VH comprising the amino acid sequence of SEQ ID NO: 6124 (or an amino acid sequence having at least about 75%, 80%, 85%, 90%, 95%, or 99% sequence identity to SEQ ID NO: 6124).

[0027] 19. The antibody molecule of any of embodiments 5-18, wherein the antigen binding domain comprises a heavy chain variable region (VH) comprising a heavy chain framework region 1 (VHFWR1) amino acid sequence of SEQ ID NO: 6022 (or a sequence with no more than 1, 2, 3, 4, 5, or 6 mutations, e.g., substitutions, additions, or deletions, therefrom), a VHFWR2 amino acid sequence of SEQ ID NO: 6023 (or a sequence with no more than 1, 2, 3, 4, 5, or 6 mutations, e.g., substitutions, additions, or deletions, therefrom), a VHFWR3 amino acid sequence of SEQ ID NO: 6024 (or a sequence with no more than 1, 2, 3, 4, 5, or 6 mutations, e.g., substitutions, additions, or deletions, therefrom), or a VHFWR4 amino acid sequence of SEQ ID NO: 6025 (or a sequence with no more than 1, 2, 3, 4, 5, or 6 mutations, e.g., substitutions, additions, or deletions, therefrom).

[0028] 20. The antibody molecule of embodiment 19, wherein the antigen binding domain comprises a heavy chain variable region (VH) comprising a heavy chain framework region 1 (VHFWR1) amino acid sequence of SEQ ID NO: 6022, a VHFWR2 amino acid sequence of SEQ ID NO: 6023, a VHFWR3 amino acid sequence of SEQ ID NO: 6024, or a VHFWR4 amino acid sequence of SEQ ID NO: 6025.

[0029] 21. The antibody molecule of embodiment 20, wherein the antigen binding domain comprises a VH comprising the amino acid sequence of SEQ ID NO: 6125 (or an amino acid sequence having at least about 75%, 80%, 85%, 90%, 95%, or 99% sequence identity to SEQ ID NO: 6125).

[0030] 22. The antibody molecule of any of embodiments 5-21, wherein the antigen binding domain comprises a heavy chain variable region (VH) comprising a heavy chain framework region 1 (VHFWR1) amino acid sequence of SEQ ID NO: 6026 (or a sequence with no more than 1, 2, 3, 4, 5, or 6 mutations, e.g., substitutions, additions, or deletions, therefrom), a VHFWR2 amino acid sequence of SEQ ID NO: 6027 (or a sequence with no more than 1, 2, 3, 4, 5, or 6 mutations, e.g., substitutions, additions, or deletions, therefrom), a VHFWR3 amino acid sequence of SEQ ID NO: 6028 (or a sequence with no more than 1, 2, 3, 4, 5, or 6 mutations, e.g., substitutions, additions, or deletions, therefrom), or a VHFWR4 amino acid sequence of SEQ ID NO: 6029 (or a sequence with no more than 1, 2, 3, 4, 5, or 6 mutations, e.g., substitutions, additions, or deletions, therefrom).

[0031] 23. The antibody molecule of embodiment 22, wherein the antigen binding domain comprises a heavy chain variable region (VH) comprising a heavy chain framework region 1 (VHFWR1) amino acid sequence of SEQ ID NO: 6026, a VHFWR2 amino acid sequence of SEQ ID NO: 6027, a VHFWR3 amino acid sequence of SEQ ID NO: 6028, or a VHFWR4 amino acid sequence of SEQ ID NO: 6029.

[0032] 24. The antibody molecule of embodiment 23, wherein the antigen binding domain comprises a VH comprising the amino acid sequence of SEQ ID NO: 6126 (or an amino acid sequence having at least about 75%, 80%, 85%, 90%, 95%, or 99% sequence identity to SEQ ID NO: 6126).

[0033] 25. The antibody molecule of any of embodiments 5-24, wherein the antigen binding domain comprises a heavy chain variable region (VH) comprising a heavy chain framework region 1 (VHFWR1) amino acid sequence of SEQ ID NO: 6030 (or a sequence with no more than 1, 2, 3, 4, 5, or 6 mutations, e.g., substitutions, additions, or deletions, therefrom), a VHFWR2 amino acid sequence of SEQ ID NO: 6032 (or a sequence with no more than 1, 2, 3, 4, 5, or 6 mutations, e.g., substitutions, additions, or deletions, therefrom), a VHFWR3 amino acid sequence of SEQ ID NO: 6033 (or a sequence with no more than 1, 2, 3, 4, 5, or 6 mutations, e.g., substitutions, additions, or deletions, therefrom), or a VHFWR4 amino acid sequence of SEQ ID NO: 6034 (or a sequence with no more than 1, 2, 3, 4, 5, or 6 mutations, e.g., substitutions, additions, or deletions, therefrom).

[0034] 26. The antibody molecule of embodiment 25, wherein the antigen binding domain comprises a heavy chain variable region (VH) comprising a heavy chain framework region 1 (VHFWR1) amino acid sequence of SEQ ID NO: 6030, a VHFWR2 amino acid sequence of SEQ ID NO: 6032, a VHFWR3 amino acid sequence of SEQ ID NO: 6033, or a VHFWR4 amino acid sequence of SEQ ID NO: 6034.

[0035] 27. The antibody molecule of embodiment 26, wherein the antigen binding domain comprises a VH comprising the amino acid sequence of SEQ ID NO: 6127 (or an amino acid sequence having at least about 75%, 80%, 85%, 90%, 95%, or 99% sequence identity to SEQ ID NO: 6127).

[0036] 28. The antibody molecule of any of embodiments 5-27, wherein the antigen binding domain comprises a heavy chain variable region (VH) comprising a heavy chain framework region 1 (VHFWR1) amino acid sequence of SEQ ID NO: 6035 (or a sequence with no more than 1, 2, 3, 4, 5, or 6 mutations, e.g., substitutions, additions, or deletions, therefrom), a VHFWR2 amino acid sequence of SEQ ID NO: 6036 (or a sequence with no more than 1, 2, 3, 4, 5, or 6 mutations, e.g., substitutions, additions, or deletions, therefrom), a VHFWR3 amino acid sequence of SEQ ID NO: 6037 (or a sequence with no more than 1, 2, 3, 4, 5, or 6 mutations, e.g., substitutions, additions, or deletions, therefrom), or a VHFWR4 amino acid sequence of SEQ ID NO: 6038 (or a sequence with no more than 1, 2, 3, 4, 5, or 6 mutations, e.g., substitutions, additions, or deletions, therefrom).

[0037] 29. The antibody molecule of embodiment 28, wherein the antigen binding domain comprises a heavy chain variable region (VH) comprising a heavy chain framework region 1 (VHFWR1) amino acid sequence of SEQ ID NO: 6035, a VHFWR2 amino acid sequence of SEQ ID NO: 6036, a VHFWR3 amino acid sequence of SEQ ID NO: 6037, or a VHFWR4 amino acid sequence of SEQ ID NO: 6038.

[0038] 30. The antibody molecule of embodiment 29, wherein the antigen binding domain comprises a VH comprising the amino acid sequence of SEQ ID NO: 6128 (or an amino acid sequence having at least about 75%, 80%, 85%, 90%, 95%, or 99% sequence identity to SEQ ID NO: 6128).

[0039] 31. The antibody molecule of any of embodiments 5, 6, or 13-30, wherein the antigen binding domain comprises a light chain variable region (VL) comprising a light chain framework region 1 (VLFWR1) amino acid sequence of SEQ ID NO: 6077 (or a sequence with no more than 1, 2, 3, 4, 5, or 6 mutations, e.g., substitutions, additions, or deletions, therefrom), a VLFWR2 amino acid sequence of SEQ ID NO: 6078 (or a sequence with no more than 1, 2, 3, 4, 5, or 6 mutations, e.g., substitutions, additions, or deletions, therefrom), a VLFWR3 amino acid sequence of SEQ ID NO: 6079 (or a sequence with no more than 1, 2, 3, 4, 5, or 6 mutations, e.g., substitutions, additions, or deletions, therefrom), or a VLFWR4 amino acid sequence of SEQ ID NO: 6080 (or a sequence with no more than 1, 2, 3, 4, 5, or 6 mutations, e.g., substitutions, additions, or deletions, therefrom).

[0040] 32. The antibody molecule of embodiment 31, wherein the antigen binding domain comprises a light chain variable region (VL) comprising a light chain framework region 1 (VLFWR1) amino acid sequence of SEQ ID NO: 6077, a VLFWR2 amino acid sequence of SEQ ID NO: 6078, a VLFWR3 amino acid sequence of SEQ ID NO: 6079, or a VLFWR4 amino acid sequence of SEQ ID NO: 6080.

[0041] 33. The antibody molecule of embodiment 32, wherein the antigen binding domain comprises a VL comprising the amino acid sequence of SEQ ID NO: 6137 (or an amino acid sequence having at least about 93%, 95%, or 99% sequence identity to SEQ ID NO: 6137).

[0042] 34. The antibody molecule of any of embodiments 5, 6, or 13-30, wherein the antigen binding domain comprises a light chain variable region (VL) comprising a light chain framework region 1 (VLFWR1) amino acid sequence of SEQ ID NO: 6081 (or a sequence with no more than 1, 2, 3, 4, 5, or 6 mutations, e.g., substitutions, additions, or deletions, therefrom), a VLFWR2 amino acid sequence of SEQ ID NO: 6082 (or a sequence with no more than 1, 2, 3, 4, 5, or 6 mutations, e.g., substitutions, additions, or deletions, therefrom), a VLFWR3 amino acid sequence of SEQ ID NO: 6083 (or a sequence with no more than 1, 2, 3, 4, 5, or 6 mutations, e.g., substitutions, additions, or deletions, therefrom), or a VLFWR4 amino acid sequence of SEQ ID NO: 6084 (or a sequence with no more than 1, 2, 3, 4, 5, or 6 mutations, e.g., substitutions, additions, or deletions, therefrom).

[0043] 35. The antibody molecule of embodiment 34, wherein the antigen binding domain comprises a light chain variable region (VL) comprising a light chain framework region 1 (VLFWR1) amino acid sequence of SEQ ID NO: 6081, a VLFWR2 amino acid sequence of SEQ ID NO: 6082, a VLFWR3 amino acid sequence of SEQ ID NO: 6083, or a VLFWR4 amino acid sequence of SEQ ID NO: 6084.

[0044] 36. The antibody molecule of embodiment 35, wherein the antigen binding domain comprises a VL comprising the amino acid sequence of SEQ ID NO: 6138 (or an amino acid sequence having at least about 93%, 95%, or 99% sequence identity to SEQ ID NO: 6138).

[0045] 37. The antibody molecule of any of embodiments 5, 6, or 13-30, wherein the antigen binding domain comprises a light chain variable region (VL) comprising a light chain framework region 1 (VLFWR1) amino acid sequence of SEQ ID NO: 6085 (or a sequence with no more than 1, 2, 3, 4, 5, or 6 mutations, e.g., substitutions, additions, or deletions, therefrom), a VLFWR2 amino acid sequence of SEQ ID NO: 6086 (or a sequence with no more than 1, 2, 3, 4, 5, or 6 mutations, e.g., substitutions, additions, or deletions, therefrom), a VLFWR3 amino acid sequence of SEQ ID NO: 6087 (or a sequence with no more than 1, 2, 3, 4, 5, or 6 mutations, e.g., substitutions, additions, or deletions, therefrom), or a VLFWR4 amino acid sequence of SEQ ID NO: 6088 (or a sequence with no more than 1, 2, 3, 4, 5, or 6 mutations, e.g., substitutions, additions, or deletions, therefrom).

[0046] 38. The antibody molecule of embodiment 37, wherein the antigen binding domain comprises a light chain variable region (VL) comprising a light chain framework region 1 (VLFWR1) amino acid sequence of SEQ ID NO: 6085, a VLFWR2 amino acid sequence of SEQ ID NO: 6086, a VLFWR3 amino acid sequence of SEQ ID NO: 6087, or a VLFWR4 amino acid sequence of SEQ ID NO: 6088.

[0047] 39. The antibody molecule of embodiment 38, wherein the antigen binding domain comprises a VL comprising the amino acid sequence of SEQ ID NO: 6139 (or an amino acid sequence having at least about 93%, 95%, or 99% sequence identity to SEQ ID NO: 6139).

[0048] 40. The antibody molecule of any of embodiments 5, 6, or 13-30, wherein the antigen binding domain comprises a light chain variable region (VL) comprising a light chain framework region 1 (VLFWR1) amino acid sequence of SEQ ID NO: 6089 (or a sequence with no more than 1, 2, 3, 4, 5, or 6 mutations, e.g., substitutions, additions, or deletions, therefrom), a VLFWR2 amino acid sequence of SEQ ID NO: 6090 (or a sequence with no more than 1, 2, 3, 4, 5, or 6 mutations, e.g., substitutions, additions, or deletions, therefrom), a VLFWR3 amino acid sequence of SEQ ID NO: 6091 (or a sequence with no more than 1, 2, 3, 4, 5, or 6 mutations, e.g., substitutions, additions, or deletions, therefrom), or a VLFWR4 amino acid sequence of SEQ ID NO: 6092 (or a sequence with no more than 1, 2, 3, 4, 5, or 6 mutations, e.g., substitutions, additions, or deletions, therefrom).

[0049] 41. The antibody molecule of embodiment 40, wherein the antigen binding domain comprises a light chain variable region (VL) comprising a light chain framework region 1 (VLFWR1) amino acid sequence of SEQ ID NO: 6089, a VLFWR2 amino acid sequence of SEQ ID NO: 6090, a VLFWR3 amino acid sequence of SEQ ID NO: 6091, or a VLFWR4 amino acid sequence of SEQ ID NO: 6092.

[0050] 42. The antibody molecule of embodiment 41, wherein the antigen binding domain comprises a VL comprising the amino acid sequence of SEQ ID NO: 6140 (or an amino acid sequence having at least about 93%, 95%, or 99% sequence identity to SEQ ID NO: 6140).

[0051] 43. The antibody molecule of any of embodiments 5, 6, or 13-30, wherein the antigen binding domain comprises a light chain variable region (VL) comprising a light chain framework region 1 (VLFWR1) amino acid sequence of SEQ ID NO: 6093 (or a sequence with no more than 1, 2, 3, 4, 5, or 6 mutations, e.g., substitutions, additions, or deletions, therefrom), a VLFWR2 amino acid sequence of SEQ ID NO: 6094 (or a sequence with no more than 1, 2, 3, 4, 5, or 6 mutations, e.g., substitutions, additions, or deletions, therefrom), a VLFWR3 amino acid sequence of SEQ ID NO: 6095 (or a sequence with no more than 1, 2, 3, 4, 5, or 6 mutations, e.g., substitutions, additions, or deletions, therefrom), or a VLFWR4 amino acid sequence of SEQ ID NO: 6096 (or a sequence with no more than 1, 2, 3, 4, 5, or 6 mutations, e.g., substitutions, additions, or deletions, therefrom).

[0052] 44. The antibody molecule of embodiment 43, wherein the antigen binding domain comprises a light chain variable region (VL) comprising a light chain framework region 1 (VLFWR1) amino acid sequence of SEQ ID NO: 6093, a VLFWR2 amino acid sequence of SEQ ID NO: 6094, a VLFWR3 amino acid sequence of SEQ ID NO: 6095, or a VLFWR4 amino acid sequence of SEQ ID NO: 6096.

[0053] 45. The antibody molecule of embodiment 44, wherein the antigen binding domain comprises a VL comprising the amino acid sequence of SEQ ID NO: 6141 (or an amino acid sequence having at least about 93%, 95%, or 99% sequence identity to SEQ ID NO: 6141).

[0054] 46. An isolated antibody molecule that binds to NKp30, comprising:

(i) a heavy chain variable region (VH) comprising a heavy chain complementarity determining region 1 (VHCDR1) amino acid sequence of SEQ ID NO: 6007 (or a sequence with no more than 1, 2, 3, or 4 mutations, e.g., substitutions, additions, or deletions), a VHCDR2 amino acid sequence of SEQ ID NO: 6008 (or a sequence with no more than 1, 2, 3, or 4 mutations, e.g., substitutions, additions, or deletions), and/or a VHCDR3 amino acid sequence of SEQ ID NO: 6009 (or a sequence with no more than 1, 2, 3, or 4 mutations, e.g., substitutions, additions, or deletions), and
(ii) a light chain variable region (VL) comprising a light chain complementarity determining region 1 (VLCDR1) amino acid sequence of SEQ ID NO: 6070 (or a sequence with no more than 1, 2, 3, or 4 mutations, e.g., substitutions, additions, or deletions), a VLCDR2 amino acid sequence of SEQ ID NO: 6071 (or a sequence with no more than 1, 2, 3, or 4 mutations, e.g., substitutions, additions, or deletions), and/or a VLCDR3 amino acid sequence of SEQ ID NO: 6072 (or a sequence with no more than 1, 2, 3, or 4 mutations, e.g., substitutions, additions, or deletions).

[0055] 47. The antibody molecule of embodiment 46, wherein the antigen binding domain comprises:

(i) a heavy chain variable region (VH) comprising a heavy chain complementarity determining region 1 (VHCDR1) amino acid sequence of SEQ ID NO: 6007, a VHCDR2 amino acid sequence of SEQ ID NO: 6008, and/or a VHCDR3 amino acid sequence of SEQ ID NO: 6009, and
(ii) a light chain variable region (VL) comprising a light chain complementarity determining region 1 (VLCDR1) amino acid sequence of SEQ ID NO: 6070, a VLCDR2 amino acid sequence of SEQ ID NO: 6071, and/or a VLCDR3 amino acid sequence of SEQ ID NO: 6072.

[0056] 48. The antibody molecule of embodiments 46 or 47, wherein the antigen binding domain comprises:

(1) a heavy chain variable region (VH) comprising a heavy chain framework region 1 (VHFWR1) amino acid sequence of SEQ ID NO: 6010 (or a sequence with no more than 1, 2, 3, 4, 5, or 6 mutations, e.g., substitutions, additions, or deletions, therefrom), a VHFWR2 amino acid sequence of SEQ ID NO: 6011 (or a sequence with no more than 1, 2, 3, 4, 5, or 6 mutations, e.g., substitutions, additions, or deletions, therefrom), a VHFWR3 amino acid sequence of SEQ ID NO: 6012 (or a sequence with no more than 1, 2, 3, 4, 5, or 6 mutations, e.g., substitutions, additions, or deletions, therefrom), or a VHFWR4 amino acid sequence of SEQ ID NO: 6013 (or a sequence with no more than 1, 2, 3, 4, 5, or 6 mutations, e.g., substitutions, additions, or deletions, therefrom), and/or
(2) a light chain variable region (VL) comprising a light chain framework region 1 (VLFWR1) amino acid sequence of SEQ ID NO: 6073 (or a sequence with no more than 1, 2, 3, 4, 5, or 6 mutations, e.g., substitutions, additions, or deletions, therefrom), a VLFWR2 amino acid sequence of SEQ ID NO: 6074 (or a sequence with no more than 1, 2, 3, 4, 5, or 6 mutations, e.g., substitutions, additions, or deletions, therefrom), a VLFWR3 amino acid sequence of SEQ ID NO: 6075 (or a sequence with no more than 1, 2, 3, 4, 5, or 6 mutations, e.g., substitutions, additions, or deletions, therefrom), or a VLFWR4 amino acid sequence of SEQ ID NO: 6076 (or a sequence with no more than 1, 2, 3, 4, 5, or 6 mutations, e.g., substitutions, additions, or deletions, therefrom).

[0057] 49. The antibody molecule of embodiment 48, wherein the antigen binding domain comprises:

(1) a heavy chain variable region (VH) comprising a heavy chain framework region 1 (VHFWR1) amino acid sequence of SEQ ID NO: 6010, a VHFWR2 amino acid sequence of SEQ ID NO: 6011, a VHFWR3 amino acid sequence of SEQ ID NO: 6012, or a VHFWR4 amino acid sequence of SEQ ID NO: 6013, and
(3) a light chain variable region (VL) comprising a light chain framework region 1 (VLFWR1) amino acid sequence of SEQ ID NO: 6073, a VLFWR2 amino acid sequence of SEQ ID NO: 6074, a VLFWR3 amino acid sequence of SEQ ID NO: 6075, or a VLFWR4 amino acid sequence of SEQ ID NO: 6076.

[0058] 50. The antibody molecule of any one of embodiments 46-49, wherein the antigen binding domain comprises:

(i) a VH comprising the amino acid sequence of SEQ ID NO: 6122 (or an amino acid sequence having at least about 75%, 80%, 85%, 90%, 95%, or 99% sequence identity to SEQ ID NO: 6122), and/or
(ii) a VL comprising the amino acid sequence of SEQ ID NO: 6136 (or an amino acid sequence having at least about 93%, 95%, or 99% sequence identity to SEQ ID NO: 6136).

[0059] 51. The antibody molecule of any of embodiments 46-50, wherein the antigen binding domain comprises a heavy chain comprising the amino acid sequence of SEQ ID NOs: 6151 or 6152 (or an amino acid sequence having at least about 75%, 80%, 85%, 90%, 95%, or 99% sequence identity to SEQ ID NOs: 6151 or 6152).

[0060] 52. The antibody molecule of any of embodiments 46-51, wherein the antigen binding domain comprises a light chain comprising the amino acid sequence of SEQ ID NO: 6153 (or an amino acid sequence having at least about 75%, 80%, 85%, 90%, 95%, or 99% sequence identity to SEQ ID NO: 6153).

[0061] 53. The antibody molecule of any of embodiments 46-51, wherein the antigen binding domain comprises a heavy chain comprising the amino acid sequence of SEQ ID NOs: 6151 or 6152 (or an amino acid sequence having at least about 75%, 80%, 85%, 90%, 95%, or 99% sequence identity to SEQ ID NOs: 6151 or 6152), and a light chain comprising the amino acid sequence of SEQ ID NO: 6153 (or an amino acid sequence having at least about 75%, 80%, 85%, 90%, 95%, or 99% sequence identity to SEQ ID NO: 6153).

[0062] 54. The antibody molecule of embodiments 46 or 47, wherein the antigen binding domain comprises a heavy chain variable region (VH) comprising a heavy chain framework region 1 (VHFWR1) amino acid sequence of SEQ ID NO: 6039 (or a sequence with no more than 1, 2, 3, 4, 5, or 6 mutations, e.g., substitutions, additions, or deletions, therefrom), a VHFWR2 amino acid sequence of SEQ ID NO: 6040 (or a sequence with no more than 1, 2, 3, 4, 5, or 6 mutations, e.g., substitutions, additions, or deletions, therefrom), a VHFWR3 amino acid sequence of SEQ ID NO: 6041 (or a sequence with no more than 1, 2, 3, 4, 5, or 6 mutations, e.g., substitutions, additions, or deletions, therefrom), or a VHFWR4 amino acid sequence of SEQ ID NO: 6042 (or a sequence with no more than 1, 2, 3, 4, 5, or 6 mutations, e.g., substitutions, additions, or deletions, therefrom).

[0063] 55. The antibody molecule of embodiment 54, wherein the antigen binding domain comprises a heavy chain variable region (VH) comprising a heavy chain framework region 1 (VHFWR1) amino acid sequence of SEQ ID NO: 6039, a VHFWR2 amino acid sequence of SEQ ID NO: 6040, a VHFWR3 amino acid sequence of SEQ ID NO: 6041, or a VHFWR4 amino acid sequence of SEQ ID NO: 6042.

[0064] 56. The antibody molecule of embodiment 55, wherein the antigen binding domain comprises a VH comprising the amino acid sequence of SEQ ID NO: 6129 (or an amino acid sequence having at least about 75%, 80%, 85%, 90%, 95%, or 99% sequence identity to SEQ ID NO: 6129).

[0065] 57. The antibody molecule of embodiments 46 or 47, wherein the antigen binding domain comprises a heavy chain variable region (VH) comprising a heavy chain framework region 1 (VHFWR1) amino acid sequence of SEQ ID NO: 6043 (or a sequence with no more than 1, 2, 3, 4, 5, or 6 mutations, e.g., substitutions, additions, or deletions, therefrom), a VHFWR2 amino acid sequence of SEQ ID NO: 6044 (or a sequence with no more than 1, 2, 3, 4, 5, or 6 mutations, e.g., substitutions, additions, or deletions, therefrom), a VHFWR3 amino acid sequence of SEQ ID NO: 6045 (or a sequence with no more than 1, 2, 3, 4, 5, or 6 mutations, e.g., substitutions, additions, or deletions, therefrom), or a VHFWR4 amino acid sequence of SEQ ID NO: 6046 (or a sequence with no more than 1, 2, 3, 4, 5, or 6 mutations, e.g., substitutions, additions, or deletions, therefrom).

[0066] 58. The antibody molecule of embodiment 57, wherein the antigen binding domain comprises a heavy chain variable region (VH) comprising a heavy chain framework region 1 (VHFWR1) amino acid sequence of SEQ ID NO: 6043, a VHFWR2 amino acid sequence of SEQ ID NO: 6044, a VHFWR3 amino acid sequence of SEQ ID NO: 6045, or a VHFWR4 amino acid sequence of SEQ ID NO: 6046.

[0067] 59. The antibody molecule of embodiment 58, wherein the antigen binding domain comprises a VH comprising the amino acid sequence of SEQ ID NO: 6130 (or an amino acid sequence having at least about 75%, 80%, 85%, 90%, 95%, or 99% sequence identity to SEQ ID NO: 6130).

[0068] 60. The antibody molecule of any of embodiments 46 or 47, wherein the antigen binding domain comprises a heavy chain variable region (VH) comprising a heavy chain framework region 1 (VHFWR1) amino acid sequence of SEQ ID NO: 6047 (or a sequence with no more than 1, 2, 3, 4, 5, or 6 mutations, e.g., substitutions, additions, or deletions, therefrom), a VHFWR2 amino acid sequence of SEQ ID NO: 6048 (or a sequence with no more than 1, 2, 3, 4, 5, or 6 mutations, e.g., substitutions, additions, or deletions, therefrom), a VHFWR3 amino acid sequence of SEQ ID NO: 6049 (or a sequence with no more than 1, 2, 3, 4, 5, or 6 mutations, e.g., substitutions, additions, or deletions, therefrom), or a VHFWR4 amino acid sequence of SEQ ID NO: 6050 (or a sequence with no more than 1, 2, 3, 4, 5, or 6 mutations, e.g., substitutions, additions, or deletions, therefrom).

[0069] 61. The antibody molecule of embodiment 60, wherein the antigen binding domain comprises a heavy chain variable region (VH) comprising a heavy chain framework region 1 (VHFWR1) amino acid sequence of SEQ ID NO: 6047, a VHFWR2 amino acid sequence of SEQ ID NO: 6048, a VHFWR3 amino acid sequence of SEQ ID NO: 6049, or a VHFWR4 amino acid sequence of SEQ ID NO: 6050.

[0070] 62. The antibody molecule of embodiment 61, wherein the antigen binding domain comprises a VH comprising the amino acid sequence of SEQ ID NO: 6131 (or an amino acid sequence having at least about 75%, 80%, 85%, 90%, 95%, or 99% sequence identity to SEQ ID NO: 6131).

[0071] 63. The antibody molecule of any of embodiments 46 or 47, wherein the antigen binding domain comprises a heavy chain variable region (VH) comprising a heavy chain framework region 1 (VHFWR1) amino acid sequence of SEQ ID NO: 6051 (or a sequence with no more than 1, 2, 3, 4, 5, or 6 mutations, e.g., substitutions, additions, or deletions, therefrom), a VHFWR2 amino acid sequence of SEQ ID NO: 6052 (or a sequence with no more than 1, 2, 3, 4, 5, or 6 mutations, e.g., substitutions, additions, or deletions, therefrom), a VHFWR3 amino acid sequence of SEQ ID NO: 6053 (or a sequence with no more than 1, 2, 3, 4, 5, or 6 mutations, e.g., substitutions, additions, or deletions, therefrom), or a VHFWR4 amino acid sequence of SEQ ID NO: 6054 (or a sequence with no more than 1, 2, 3, 4, 5, or 6 mutations, e.g., substitutions, additions, or deletions, therefrom).

[0072] 64. The antibody molecule of embodiment 63, wherein the antigen binding domain comprises a heavy chain variable region (VH) comprising a heavy chain framework region 1 (VHFWR1) amino acid sequence of SEQ ID NO: 6051, a VHFWR2 amino acid sequence of SEQ ID NO: 6052, a VHFWR3 amino acid sequence of SEQ ID NO: 6053, or a VHFWR4 amino acid sequence of SEQ ID NO: 6054.

[0073] 65. The antibody molecule of embodiment 64, wherein the antigen binding domain comprises a VH comprising the amino acid sequence of SEQ ID NO: 6132 (or an amino acid sequence having at least about 75%, 80%, 85%, 90%, 95%, or 99% sequence identity to SEQ ID NO: 6132).

[0074] 66. The antibody molecule of any of embodiments 46 or 47, wherein the antigen binding domain comprises a heavy chain variable region (VH) comprising a heavy chain framework region 1 (VHFWR1) amino acid sequence of SEQ ID NO: 6055 (or a sequence with no more than 1, 2, 3, 4, 5, or 6 mutations, e.g., substitutions, additions, or deletions, therefrom), a VHFWR2 amino acid sequence of SEQ ID NO: 6056 (or a sequence with no more than 1, 2, 3, 4, 5, or 6 mutations, e.g., substitutions, additions, or deletions, therefrom), a VHFWR3 amino acid sequence of SEQ ID NO: 6057 (or a sequence with no more than 1, 2, 3, 4, 5, or 6 mutations, e.g., substitutions, additions, or deletions, therefrom), or a VHFWR4 amino acid sequence of SEQ ID NO: 6058 (or a sequence with no more than 1, 2, 3, 4, 5, or 6 mutations, e.g., substitutions, additions, or deletions, therefrom).

[0075] 67. The antibody molecule of embodiment 66, wherein the antigen binding domain comprises a heavy chain variable region (VH) comprising a heavy chain framework region 1 (VHFWR1) amino acid sequence of SEQ ID NO: 6055, a VHFWR2 amino acid sequence of SEQ ID NO: 6056, a VHFWR3 amino acid sequence of SEQ ID NO: 6057, or a VHFWR4 amino acid sequence of SEQ ID NO: 6058.

[0076] 68. The antibody molecule of embodiment 67, wherein the antigen binding domain comprises a VH comprising the amino acid sequence of SEQ ID NO: 6133 (or an amino acid sequence having at least about 75%, 80%, 85%, 90%, 95%, or 99% sequence identity to SEQ ID NO: 6133).

[0077] 69. The antibody molecule of any of embodiments 46 or 47, wherein the antigen binding domain comprises a heavy chain variable region (VH) comprising a heavy chain framework region 1 (VHFWR1) amino acid sequence of SEQ ID NO: 6059 (or a sequence with no more than 1, 2, 3, 4, 5, or 6 mutations, e.g., substitutions, additions, or deletions, therefrom), a VHFWR2 amino acid sequence of SEQ ID NO: 6060 (or a sequence with no more than 1, 2, 3, 4, 5, or 6 mutations, e.g., substitutions, additions, or deletions, therefrom), a VHFWR3 amino acid sequence of SEQ ID NO: 6061 (or a sequence with no more than 1, 2, 3, 4, 5, or 6 mutations, e.g., substitutions, additions, or deletions, therefrom), or a VHFWR4 amino acid sequence of SEQ ID NO: 6062 (or a sequence with no more than 1, 2, 3, 4, 5, or 6 mutations, e.g., substitutions, additions, or deletions, therefrom).

[0078] 70. The antibody molecule of embodiment 69, wherein the antigen binding domain comprises a heavy chain variable region (VH) comprising a heavy chain framework region 1 (VHFWR1) amino acid sequence of SEQ ID NO: 6059, a VHFWR2 amino acid sequence of SEQ ID NO: 6060, a VHFWR3 amino acid sequence of SEQ ID NO: 6061, or a VHFWR4 amino acid sequence of SEQ ID NO: 6062.

[0079] 71. The antibody molecule of embodiment 70, wherein the antigen binding domain comprises a VH comprising the amino acid sequence of SEQ ID NO: 6134 (or an amino acid sequence having at least about 75%, 80%, 85%, 90%, 95%, or 99% sequence identity to SEQ ID NO: 6134).

[0080] 72. The antibody molecule of any of embodiments 46, 47, or 54-71, wherein the antigen binding domain comprises a light chain variable region (VL) comprising a light chain framework region 1 (VLFWR1) amino acid sequence of SEQ ID NO: 6097 (or a sequence with no more than 1, 2, 3, 4, 5, or 6 mutations, e.g., substitutions, additions, or deletions, therefrom), a VLFWR2 amino acid sequence of SEQ ID NO: 6098 (or a sequence with no more than 1, 2, 3, 4, 5, or 6 mutations, e.g., substitutions, additions, or deletions, therefrom), a VLFWR3 amino acid sequence of SEQ ID NO: 6099 (or a sequence with no more than 1, 2, 3, 4, 5, or 6 mutations, e.g., substitutions, additions, or deletions, therefrom), or a VLFWR4 amino acid sequence of SEQ ID NO: 6100 (or a sequence with no more than 1, 2, 3, 4, 5, or 6 mutations, e.g., substitutions, additions, or deletions, therefrom).

[0081] 73. The antibody molecule of embodiment 72, wherein the antigen binding domain comprises a light chain variable region (VL) comprising a light chain framework region 1 (VLFWR1) amino acid sequence of SEQ ID NO: 6097, a VLFWR2 amino acid sequence of SEQ ID NO: 6098, a VLFWR3 amino acid sequence of SEQ ID NO: 6099, or a VLFWR4 amino acid sequence of SEQ ID NO: 6100.

[0082] 74. The antibody molecule of embodiment 73, wherein the antigen binding domain comprises a VL comprising the amino acid sequence of SEQ ID NO: 6142 (or an amino acid sequence having at least about 93%, 95%, or 99% sequence identity to SEQ ID NO: 6142).

[0083] 75. The antibody molecule of any of embodiments 46, 47, or 54-74, wherein the antigen binding domain comprises a light chain variable region (VL) comprising a light chain framework region 1 (VLFWR1) amino acid sequence of SEQ ID NO: 6101 (or a sequence with no more than 1, 2, 3, 4, 5, or 6 mutations, e.g., substitutions, additions, or deletions, therefrom), a VLFWR2 amino acid sequence of SEQ ID NO: 6102 (or a sequence with no more than 1, 2, 3, 4, 5, or 6 mutations, e.g., substitutions, additions, or deletions, therefrom), a VLFWR3 amino acid sequence of SEQ ID NO: 6103 (or a sequence with no more than 1, 2, 3, 4, 5, or 6 mutations, e.g., substitutions, additions, or deletions, therefrom), or a VLFWR4 amino acid sequence of SEQ ID NO: 6104 (or a sequence with no more than 1, 2, 3, 4, 5, or 6 mutations, e.g., substitutions, additions, or deletions, therefrom).

[0084] 76. The antibody molecule of embodiment 75, wherein the antigen binding domain comprises a light chain variable region (VL) comprising a light chain framework region 1 (VLFWR1) amino acid sequence of SEQ ID NO: 6101, a VLFWR2 amino acid sequence of SEQ ID NO: 6102, a VLFWR3 amino acid sequence of SEQ ID NO: 6103, or a VLFWR4 amino acid sequence of SEQ ID NO: 6104.

[0085] 77. The antibody molecule of embodiment 76, wherein the antigen binding domain comprises a VL comprising the amino acid sequence of SEQ ID NO: 6143 (or an amino acid sequence having at least about 93%, 95%, or 99% sequence identity to SEQ ID NO: 6143).

[0086] 78. The antibody molecule of any of embodiments 46, 47, or 54-77, wherein the antigen binding domain comprises a light chain variable region (VL) comprising a light chain framework region 1 (VLFWR1) amino acid sequence of SEQ ID NO: 6105 (or a sequence with no more than 1, 2, 3, 4, 5, or 6 mutations, e.g., substitutions, additions, or deletions, therefrom), a VLFWR2 amino acid sequence of SEQ ID NO: 6106 (or a sequence with no more than 1, 2, 3, 4, 5, or 6 mutations, e.g., substitutions, additions, or deletions, therefrom), a VLFWR3 amino acid sequence of SEQ ID NO: 6107 (or a sequence with no more than 1, 2, 3, 4, 5, or 6 mutations, e.g., substitutions, additions, or deletions, therefrom), or a VLFWR4 amino acid sequence of SEQ ID NO: 6108 (or a sequence with no more than 1, 2, 3, 4, 5, or 6 mutations, e.g., substitutions, additions, or deletions, therefrom).

[0087] 79. The antibody molecule of embodiment 78, wherein the antigen binding domain comprises a light chain variable region (VL) comprising a light chain framework region 1 (VLFWR1) amino acid sequence of SEQ ID NO: 6105, a VLFWR2 amino acid sequence of SEQ ID NO: 6106, a VLFWR3 amino acid sequence of SEQ ID NO: 6107, or a VLFWR4 amino acid sequence of SEQ ID NO: 6108.

[0088] 80. The antibody molecule of embodiment 79, wherein the antigen binding domain comprises a VL comprising the amino acid sequence of SEQ ID NO: 6144 (or an amino acid sequence having at least about 93%, 95%, or 99% sequence identity to SEQ ID NO: 6144).

[0089] 81. The antibody molecule of any of embodiments 46, 47, or 54-80, wherein the antigen binding domain comprises a light chain variable region (VL) comprising a light chain framework region 1 (VLFWR1) amino acid sequence of SEQ ID NO: 6109 (or a sequence with no more than 1, 2, 3, 4, 5, or 6 mutations, e.g., substitutions, additions, or deletions, therefrom), a VLFWR2 amino acid sequence of SEQ ID NO: 6110 (or a sequence with no more than 1, 2, 3, 4, 5, or 6 mutations, e.g., substitutions, additions, or deletions, therefrom), a VLFWR3 amino acid sequence of SEQ ID NO: 6111 (or a sequence with no more than 1, 2, 3, 4, 5, or 6 mutations, e.g., substitutions, additions, or deletions, therefrom), or a VLFWR4 amino acid sequence of SEQ ID NO: 6112 (or a sequence with no more than 1, 2, 3, 4, 5, or 6 mutations, e.g., substitutions, additions, or deletions, therefrom).

[0090] 82. The antibody molecule of embodiment 81, wherein the antigen binding domain comprises a light chain variable region (VL) comprising a light chain framework region 1 (VLFWR1) amino acid sequence of SEQ ID NO: 6109, a VLFWR2 amino acid sequence of SEQ ID NO: 6110, a VLFWR3 amino acid sequence of SEQ ID NO: 6111, or a VLFWR4 amino acid sequence of SEQ ID NO: 6112.

[0091] 83. The antibody molecule of embodiment 78, wherein the antigen binding domain comprises a VL comprising the amino acid sequence of SEQ ID NO: 6145 (or an amino acid sequence having at least about 93%, 95%, or 99% sequence identity to SEQ ID NO: 6145).

[0092] 84. The antibody molecule of any of embodiments 46, 47, or 54-83, wherein the antigen binding domain comprises a light chain variable region (VL) comprising a light chain framework region 1 (VLFWR1) amino acid sequence of SEQ ID NO: 6113 (or a sequence with no more than 1, 2, 3, 4, 5, or 6 mutations, e.g., substitutions, additions, or deletions, therefrom), a VLFWR2 amino acid sequence of SEQ ID NO: 6114 (or a sequence with no more than 1, 2, 3, 4, 5, or 6 mutations, e.g., substitutions, additions, or deletions, therefrom), a VLFWR3 amino acid sequence of SEQ ID NO: 6115 (or a sequence with no more than 1, 2, 3, 4, 5, or 6 mutations, e.g., substitutions, additions, or deletions, therefrom), or a VLFWR4 amino acid sequence of SEQ ID NO: 6116 (or a sequence with no more than 1, 2, 3, 4, 5, or 6 mutations, e.g., substitutions, additions, or deletions, therefrom).

[0093] 85. The antibody molecule of embodiment 84, wherein the antigen binding domain comprises a light chain variable region (VL) comprising a light chain framework region 1 (VLFWR1) amino acid sequence of SEQ ID NO: 6113, a VLFWR2 amino acid sequence of SEQ ID NO: 6114, a VLFWR3 amino acid sequence of SEQ ID NO: 6115, or a VLFWR4 amino acid sequence of SEQ ID NO: 6116.

[0094] 86. The antibody molecule of embodiment 85, wherein the antigen binding domain comprises a VL comprising the amino acid sequence of SEQ ID NO: 6146 (or an amino acid sequence having at least about 93%, 95%, or 99% sequence identity to SEQ ID NO: 6146).

[0095] 87. The antibody molecule of any of embodiments 46, 47, or 54-86, wherein the antigen binding domain comprises a light chain variable region (VL) comprising a light chain framework region 1 (VLFWR1) amino acid sequence of SEQ ID NO: 6117 (or a sequence with no more than 1, 2, 3, 4, 5, or 6 mutations, e.g., substitutions, additions, or deletions, therefrom), a VLFWR2 amino acid sequence of SEQ ID NO: 6118 (or a sequence with no more than 1, 2, 3, 4, 5, or 6 mutations, e.g., substitutions, additions, or deletions, therefrom), a VLFWR3 amino acid sequence of SEQ ID NO: 6119 (or a sequence with no more than 1, 2, 3, 4, 5, or 6 mutations, e.g., substitutions, additions, or deletions, therefrom), or a VLFWR4 amino acid sequence of SEQ ID NO: 6120 (or a sequence with no more than 1, 2, 3, 4, 5, or 6 mutations, e.g., substitutions, additions, or deletions, therefrom).

[0096] 88. The antibody molecule of embodiment 87, wherein the antigen binding domain comprises a light chain variable region (VL) comprising a light chain framework region 1 (VLFWR1) amino acid sequence of SEQ ID NO: 6117, a VLFWR2 amino acid sequence of SEQ ID NO: 6118, a VLFWR3 amino acid sequence of SEQ ID NO: 6119, or a VLFWR4 amino acid sequence of SEQ ID NO: 6120.

[0097] 89. The antibody molecule of embodiment 88, wherein the antigen binding domain comprises a VL comprising the amino acid sequence of SEQ ID NO: 6147 (or an amino acid sequence having at least about 93%, 95%, or 99% sequence identity to SEQ ID NO: 6147).

[0098] 90. The antibody molecule of any one of the preceding embodiments, wherein the antigen binding domain comprises:

(i) a VH comprising the amino acid sequence of SEQ ID NO: 6122 (or an amino acid sequence having at least about 75%, 80%, 85%, 90%, 95%, or 99% sequence identity to SEQ ID NO: 6122), and/or
(ii) a VL comprising the amino acid sequence of SEQ ID NO: 6136 (or an amino acid sequence having at least about 93%, 95%, or 99% sequence identity to SEQ ID NO: 6136).

[0099] 91. A multispecific molecule comprising the antibody molecule of any of embodiments 1-90.

[0100] 92. The multispecific molecule of embodiment 91, further comprising one, two, three, four or more of:

[0101] a. a tumor targeting moiety, e.g., as described herein;

[0102] b. a cytokine molecule, e.g., as described herein;

[0103] c. a T cell engager, e.g., as described herein; or

[0104] d. a stromal modifying moiety, e.g., as described herein.

[0105] 93. The multispecific molecule of embodiment 91, further comprising a binding specificity that binds to an autoreactive T cell, e.g., an antigen present on the surface of an autoreactive T cell that is associated with the inflammatory or autoimmune disorder.

[0106] 94. The multispecific molecule of embodiment 91, further comprising a binding specificity that binds to an infected cell, e.g., a viral or bacterial infected cell.

[0107] 95. The antibody molecule, or the multispecific molecule of any of the preceding embodiments, which is a monospecific antibody molecule, a bispecific antibody molecule, or a trispecific antibody molecule.

[0108] 96. The antibody molecule, or the multispecific molecule of any of the preceding embodiments, which is a monovalent antibody molecule, a bivalent antibody molecule, or a trivalent antibody molecule.

[0109] 97. The antibody molecule, or the multispecific molecule of any of the preceding embodiments, which is a full antibody (e.g., an antibody that includes at least one, and preferably two, complete heavy chains, and at least one, and preferably two, complete light chains), or an antigen-binding fragment (e.g., a Fab, F(ab′)₂, Fv, a single chain Fv, a single domain antibody, a diabody (dAb), a bivalent antibody, or bispecific antibody or fragment thereof, a single domain variant thereof, or a camelid antibody).

[0110] 98. The antibody molecule, or the multispecific molecule of any of the preceding embodiments, which comprises a heavy chain constant region chosen from IgG1, IgG2, IgG3, or IgG4, or a fragment thereof.

[0111] 99. The antibody molecule, or the multispecific molecule of any of the preceding embodiments, which comprises a light chain constant region chosen from the light chain constant regions of kappa or lambda, or a fragment thereof.

[0112] 100. The antibody molecule, or the multispecific molecule of any of the preceding embodiments, wherein the immunoglobulin chain constant region (e.g., Fc region) is altered, e.g., mutated, to increase or decrease one or more of: Fc receptor binding, antibody glycosylation, the number of cysteine residues, effector cell function, or complement function.

[0113] 101. The antibody molecule, or the multispecific molecule of any of the preceding embodiments, wherein an interface of a first and second immunoglobulin chain constant regions (e.g., Fc region) is altered, e.g., mutated, to increase or decrease dimerization, e.g., relative to a non-engineered interface.

[0114] 102. The antibody molecule or the multispecific molecule of embodiment 101, wherein the dimerization of the immunoglobulin chain constant region (e.g., Fc region) is enhanced by providing an Fc interface of a first and a second Fc region with one or more of: a paired cavity-protuberance (“knob-in-a hole”), an electrostatic interaction, or a strand-exchange, such that a greater ratio of heteromultimer:homomultimer forms, e.g., relative to a non-engineered interface.

[0115] 103. The antibody molecule or the multispecific molecule of embodiment 101 or 102, wherein the immunoglobulin chain constant region (e.g., Fc region) comprises an amino acid substitution at a position chosen from one or more of 347, 349, 350, 351, 366, 368, 370, 392, 394, 395, 397, 398, 399, 405, 407, or 409, e.g., of the Fc region of human IgG1.

[0116] 104. The antibody molecule or the multispecific molecule of embodiment 103, wherein the immunoglobulin chain constant region (e.g., Fc region) comprises an amino acid substitution chosen from: T366S, L368A, or Y407V (e.g., corresponding to a cavity or hole), or T366W (e.g., corresponding to a protuberance or knob), or a combination thereof.

[0117] 105. The antibody molecule or the multispecific molecule of any of embodiments 1-104, further comprising a linker, e.g., a linker between one or more of: the targeting moiety and the cytokine molecule or the stromal modifying moiety, the targeting moiety and the immune cell engager, the cytokine molecule or the stromal modifying moiety, and the immune cell engager, the cytokine molecule or the stromal modifying moiety and the immunoglobulin chain constant region (e.g., the Fc region), the targeting moiety and the immunoglobulin chain constant region, or the immune cell engager and the immunoglobulin chain constant region.

[0118] 106. The antibody molecule or the multispecific molecule of embodiment 105, wherein the linker is selected from: a cleavable linker, a non-cleavable linker, a peptide linker, a flexible linker, a rigid linker, a helical linker, or a non-helical linker.

[0119] 107. The antibody molecule or the multispecific molecule of embodiment 106, wherein the linker is a peptide linker.

[0120] 108. The antibody molecule or the multispecific molecule of embodiment 107, wherein the peptide linker comprises Gly and Ser.

[0121] 109. An isolated nucleic acid molecule, which comprises the nucleotide sequence encoding any of the antibody molecules or multispecific or multifunctional molecules described herein, or a nucleotide sequence substantially homologous thereto (e.g., at least 95% to 99.9% identical thereto).

[0122] 110. An isolated nucleic acid encoding the antibody molecule or the multispecific molecule of any of embodiments 1-108.

[0123] 111. A vector, e.g., an expression vector, comprising one or more of the nucleic acid molecules of any of embodiments 109 or 110.

[0124] 112. A host cell comprising the nucleic acid molecule or the vector of embodiment 111.

[0125] 113. A method of making, e.g., producing, the antibody molecule or the multispecific or multifunctional molecule polypeptide of any of embodiments 1-108, comprising culturing the host cell of embodiment 112, under suitable conditions, e.g., conditions suitable for gene expression and/or homo- or heterodimerization.

[0126] 114. A pharmaceutical composition comprising the antibody molecule or the multispecific or multifunctional molecule polypeptide of any of embodiments 1-108 and a pharmaceutically acceptable carrier, excipient, or stabilizer.

[0127] 115. A method of treating a cancer, comprising administering to a subject in need thereof the antibody molecule or the multispecific or multifunctional molecule polypeptide of any of the preceding embodiments, wherein the multispecific antibody is administered in an amount effective to treat the cancer.

[0128] 116. The antibody molecule or the multispecific or multifunctional molecule polypeptide of any of the preceding embodiments for use in treating cancer.

[0129] 117. The method of embodiment 115 or the use of embodiment 116, wherein the cancer is a solid tumor cancer, or a metastatic lesion.

[0130] 118. The method of embodiment 117 or the use of embodiment 117, wherein the solid tumor cancer is one or more of pancreatic (e.g., pancreatic adenocarcinoma), breast, colorectal, lung (e.g., small or non-small cell lung cancer), skin, ovarian, or liver cancer.

[0131] 119. The method of embodiment 115 or the use of embodiment 116, wherein the cancer is a hematological cancer.

[0132] 120. The method of any of embodiments 115 or 116-119 or the use of any of embodiments 116-119, further comprising administering a second therapeutic treatment.

[0133] 121. The method of embodiment 120 or the use of embodiment 120, wherein the second therapeutic treatment comprises a therapeutic agent (e.g., a chemotherapeutic agent, a biologic agent, hormonal therapy), radiation, or surgery.

[0134] 122. The method of embodiment 121 or the use of embodiment 121, wherein the therapeutic agent is selected from: a chemotherapeutic agent, or a biologic agent.

[0135] 123. A method of treating an autoimmune or an inflammatory disorder, comprising administering to a subject in need thereof the antibody molecule or the multispecific or multifunctional molecule polypeptide of any of the preceding embodiments, wherein the multispecific antibody is administered in an amount effective to treat the autoimmune or the inflammatory disorder.

[0136] 124. The antibody molecule or the multispecific or multifunctional molecule polypeptide of any of the preceding embodiments for use in treating an autoimmune or an inflammatory disorder.

[0137] 125. A method of treating an infectious disorder, comprising administering to a subject in need thereof the antibody molecule or the multispecific or multifunctional molecule polypeptide of any of the preceding embodiments, wherein the multispecific antibody is administered in an amount effective to treat the infectious disorder.

[0138] 126. The antibody molecule or the multispecific or multifunctional molecule polypeptide of any of the preceding embodiments for use in treating an infectious disorder.

### BRIEF DESCRIPTION OF THE DRAWINGS

[0139] FIG. 1 is a graph showing binding of NKp30 antibodies to NK92 cells. Data was calculated as the percent-AF747 positive population.

[0140] FIG. 2 is a graph showing activation of NK92 cells by NKp30 antibodies. Data were generated using hamster anti-NKp30 mAbs.

### DETAILED DESCRIPTION OF THE INVENTION

### Definitions

[0141] Certain terms are defined below.

[0142] As used herein, the articles “a” and “an” refer to one or more than one, e.g., to at least one, of the grammatical object of the article. The use of the words “a” or “an” when used in conjunction with the term “comprising” herein may mean “one,” but it is also consistent with the meaning of “one or more,” “at least one,” and “one or more than one.”

[0143] As used herein, “about” and “approximately” generally mean an acceptable degree of error for the quantity measured given the nature or precision of the measurements. Exemplary degrees of error are within 20 percent (%), typically, within 10%, and more typically, within 5% of a given range of values.

[0144] As used herein, the term “molecule” as used in, e.g., antibody molecule, cytokine molecule, receptor molecule, includes full-length, naturally-occurring molecules, as well as variants, e.g., functional variants (e.g., truncations, fragments, mutated (e.g., substantially similar sequences) or derivatized form thereof), so long as at least one function and/or activity of the unmodified (e.g., naturally-occurring) molecule remains.

[0145] “Antibody molecule” as used herein refers to a protein, e.g., an immunoglobulin chain or fragment thereof, comprising at least one immunoglobulin variable domain sequence. An antibody molecule encompasses antibodies (e.g., full-length antibodies) and antibody fragments. In an embodiment, an antibody molecule comprises an antigen binding or functional fragment of a full-length antibody, or a full-length immunoglobulin chain. For example, a full-length antibody is an immunoglobulin (Ig) molecule (e.g., an IgG antibody) that is naturally occurring or formed by normal immunoglobulin gene fragment recombinatorial processes). In embodiments, an antibody molecule refers to an immunologically active, antigen-binding portion of an immunoglobulin molecule, such as an antibody fragment. An antibody fragment, e.g., functional fragment, is a portion of an antibody, e.g., Fab, Fab′, F(ab′)₂, F(ab)₂, variable fragment (Fv), domain antibody (dAb), or single chain variable fragment (scFv). A functional antibody fragment binds to the same antigen as that recognized by the intact (e.g., full-length) antibody. The terms “antibody fragment” or “functional fragment” also include isolated fragments consisting of the variable regions, such as the “Fv” fragments consisting of the variable regions of the heavy and light chains or recombinant single chain polypeptide molecules in which light and heavy variable regions are connected by a peptide linker (“scFv proteins”). In some embodiments, an antibody fragment does not include portions of antibodies without antigen binding activity, such as Fc fragments or single amino acid residues. Exemplary antibody molecules include full length antibodies and antibody fragments, e.g., dAb (domain antibody), single chain, Fab, Fab′, and F(ab′)₂ fragments, and single chain variable fragments (scFvs).

[0146] As used herein, an “immunoglobulin variable domain sequence” refers to an amino acid sequence which can form the structure of an immunoglobulin variable domain. For example, the sequence may include all or part of the amino acid sequence of a naturally-occurring variable domain. For example, the sequence may or may not include one, two, or more N- or C-terminal amino acids, or may include other alterations that are compatible with formation of the protein structure.

[0147] In embodiments, an antibody molecule is monospecific, e.g., it comprises binding specificity for a single epitope. In some embodiments, an antibody molecule is multispecific, e.g., it comprises a plurality of immunoglobulin variable domain sequences, where a first immunoglobulin variable domain sequence has binding specificity for a first epitope and a second immunoglobulin variable domain sequence has binding specificity for a second epitope. In some embodiments, an antibody molecule is a bispecific antibody molecule. “Bispecific antibody molecule” as used herein refers to an antibody molecule that has specificity for more than one (e.g., two, three, four, or more) epitope and/or antigen.

[0148] “Antigen” (Ag) as used herein refers to a molecule that can provoke an immune response, e.g., involving activation of certain immune cells and/or antibody generation. Any macromolecule, including almost all proteins or peptides, can be an antigen. Antigens can also be derived from genomic recombinant or DNA. For example, any DNA comprising a nucleotide sequence or a partial nucleotide sequence that encodes a protein capable of eliciting an immune response encodes an “antigen.” In embodiments, an antigen does not need to be encoded solely by a full-length nucleotide sequence of a gene, nor does an antigen need to be encoded by a gene at all. In embodiments, an antigen can be synthesized or can be derived from a biological sample, e.g., a tissue sample, a tumor sample, a cell, or a fluid with other biological components. As used, herein a “tumor antigen” or interchangeably, a “cancer antigen” includes any molecule present on, or associated with, a cancer, e.g., a cancer cell or a tumor microenvironment that can provoke an immune response. As used, herein an “immune cell antigen” includes any molecule present on, or associated with, an immune cell that can provoke an immune response.

[0149] The “antigen-binding site,” or “binding portion” of an antibody molecule refers to the part of an antibody molecule, e.g., an immunoglobulin (Ig) molecule, that participates in antigen binding. In embodiments, the antigen binding site is formed by amino acid residues of the variable (V) regions of the heavy (H) and light (L) chains. Three highly divergent stretches within the variable regions of the heavy and light chains, referred to as hypervariable regions, are disposed between more conserved flanking stretches called “framework regions,” (FRs). FRs are amino acid sequences that are naturally found between, and adjacent to, hypervariable regions in immunoglobulins. In embodiments, in an antibody molecule, the three hypervariable regions of a light chain and the three hypervariable regions of a heavy chain are disposed relative to each other in three dimensional space to form an antigen-binding surface, which is complementary to the three-dimensional surface of a bound antigen. The three hypervariable regions of each of the heavy and light chains are referred to as “complementarity-determining regions,” or “CDRs.” The framework region and CDRs have been defined and described, e.g., in Kabat, E. A., et al. (1991) Sequences of Proteins of Immunological Interest, Fifth Edition, U.S. Department of Health and Human Services, NIH Publication No. 91-3242, and Chothia, C. et al. (1987) J. Mol. Biol. 196:901-917. Each variable chain (e.g., variable heavy chain and variable light chain) is typically made up of three CDRs and four FRs, arranged from amino-terminus to carboxy-terminus in the amino acid order: FR1, CDR1, FR2, CDR2, FR3, CDR3, and FR4.

[0150] “Cancer” as used herein can encompass all types of oncogenic processes and/or cancerous growths. In embodiments, cancer includes primary tumors as well as metastatic tissues or malignantly transformed cells, tissues, or organs. In embodiments, cancer encompasses all histopathologies and stages, e.g., stages of invasiveness/severity, of a cancer. In embodiments, cancer includes relapsed and/or resistant cancer. The terms “cancer” and “tumor” can be used interchangeably. For example, both terms encompass solid and liquid tumors. As used herein, the term “cancer” or “tumor” includes premalignant, as well as malignant cancers and tumors.

[0151] As used herein, an “immune cell” refers to any of various cells that function in the immune system, e.g., to protect against agents of infection and foreign matter. In embodiments, this term includes leukocytes, e.g., neutrophils, eosinophils, basophils, lymphocytes, and monocytes. Innate leukocytes include phagocytes (e.g., macrophages, neutrophils, and dendritic cells), mast cells, eosinophils, basophils, and natural killer cells. Innate leukocytes identify and eliminate pathogens, either by attacking larger pathogens through contact or by engulfing and then killing microorganisms, and are mediators in the activation of an adaptive immune response. The cells of the adaptive immune system are special types of leukocytes, called lymphocytes. B cells and T cells are important types of lymphocytes and are derived from hematopoietic stem cells in the bone marrow. B cells are involved in the humoral immune response, whereas T cells are involved in cell-mediated immune response. The term “immune cell” includes immune effector cells.

[0152] “Immune effector cell,” as that term is used herein, refers to a cell that is involved in an immune response, e.g., in the promotion of an immune effector response. Examples of immune effector cells include, but are not limited to, T cells, e.g., alpha/beta T cells and gamma/delta T cells, B cells, natural killer (NK) cells, natural killer T (NK T) cells, and mast cells.

[0153] The term “effector function” or “effector response” refers to a specialized function of a cell. Effector function of a T cell, for example, may be cytolytic activity or helper activity including the secretion of cytokines.

[0154] The compositions and methods of the present invention encompass polypeptides and nucleic acids having the sequences specified, or sequences substantially identical or similar thereto, e.g., sequences at least 80%, 85%, 90%, 95% identical or higher to the sequence specified. In the context of an amino acid sequence, the term “substantially identical” is used herein to refer to a first amino acid that contains a sufficient or minimum number of amino acid residues that are i) identical to, or ii) conservative substitutions of aligned amino acid residues in a second amino acid sequence such that the first and second amino acid sequences can have a common structural domain and/or common functional activity. For example, amino acid sequences that contain a common structural domain having at least about 80%, 85%, 90%. 91%, 92%, 93%, 94%, 95%, 96%, 97%, 98% or 99% identity to a reference sequence, e.g., a sequence provided herein.

[0155] In the context of nucleotide sequence, the term “substantially identical” is used herein to refer to a first nucleic acid sequence that contains a sufficient or minimum number of nucleotides that are identical to aligned nucleotides in a second nucleic acid sequence such that the first and second nucleotide sequences encode a polypeptide having common functional activity, or encode a common structural polypeptide domain or a common functional polypeptide activity. For example, nucleotide sequences having at least about 80%, 85%, 90%, 91%, 92%, 93%, 94%, 95%, 96%, 97%, 98% or 99% identity to a reference sequence, e.g., a sequence provided herein.

[0156] The term “variant” refers to a polypeptide that has a substantially identical amino acid sequence to a reference amino acid sequence, or is encoded by a substantially identical nucleotide sequence. In some embodiments, the variant is a functional variant.

[0157] The term “functional variant” refers to a polypeptide that has a substantially identical amino acid sequence to a reference amino acid sequence, or is encoded by a substantially identical nucleotide sequence, and is capable of having one or more activities of the reference amino acid sequence.

[0158] Calculations of homology or sequence identity between sequences (the terms are used interchangeably herein) are performed as follows.

[0159] To determine the percent identity of two amino acid sequences, or of two nucleic acid sequences, the sequences are aligned for optimal comparison purposes (e.g., gaps can be introduced in one or both of a first and a second amino acid or nucleic acid sequence for optimal alignment and non-homologous sequences can be disregarded for comparison purposes). In a preferred embodiment, the length of a reference sequence aligned for comparison purposes is at least 30%, preferably at least 40%, more preferably at least 50%, 60%, and even more preferably at least 70%, 80%, 90%, 100% of the length of the reference sequence. The amino acid residues or nucleotides at corresponding amino acid positions or nucleotide positions are then compared. When a position in the first sequence is occupied by the same amino acid residue or nucleotide as the corresponding position in the second sequence, then the molecules are identical at that position (as used herein amino acid or nucleic acid “identity” is equivalent to amino acid or nucleic acid “homology”).

[0160] The percent identity between the two sequences is a function of the number of identical positions shared by the sequences, taking into account the number of gaps, and the length of each gap, which need to be introduced for optimal alignment of the two sequences.

[0161] The comparison of sequences and determination of percent identity between two sequences can be accomplished using a mathematical algorithm. In a preferred embodiment, the percent identity between two amino acid sequences is determined using the Needleman and Wunsch ((1970) J. Mol. Biol. 48:444-453) algorithm which has been incorporated into the GAP program in the GCG software package (available at www.gcg.com), using either a Blossum 62 matrix or a PAM250 matrix, and a gap weight of 16, 14, 12, 10, 8, 6, or 4 and a length weight of 1, 2, 3, 4, 5, or 6. In yet another preferred embodiment, the percent identity between two nucleotide sequences is determined using the GAP program in the GCG software package (available at www.gcg.com), using a NWSgapdna.CMP matrix and a gap weight of 40, 50, 60, 70, or 80 and a length weight of 1, 2, 3, 4, 5, or 6. A particularly preferred set of parameters (and the one that should be used unless otherwise specified) are a Blossum 62 scoring matrix with a gap penalty of 12, a gap extend penalty of 4, and a frameshift gap penalty of 5.

[0162] The percent identity between two amino acid or nucleotide sequences can be determined using the algorithm of E. Meyers and W. Miller ((1989) CABIOS, 4:11-17) which has been incorporated into the ALIGN program (version 2.0), using a PAM120 weight residue table, a gap length penalty of 12 and a gap penalty of 4.

[0163] The nucleic acid and protein sequences described herein can be used as a “query sequence” to perform a search against public databases to, for example, identify other family members or related sequences. Such searches can be performed using the NBLAST and) XBLAST programs (version 2.0) of Altschul, et al. (1990) J Mol. Biol. 215:403-10. BLAST nucleotide searches can be performed with the NBLAST program, score=100, wordlength=12 to obtain nucleotide sequences homologous to a nucleic acid molecule of the invention. BLAST protein searches can be performed with the XBLAST program, score=50, wordlength=3 to obtain amino acid sequences homologous to protein molecules of the invention. To obtain gapped alignments for comparison purposes, Gapped BLAST can be utilized as described in Altschul et al., (1997) Nucleic Acids Res. 25:3389-3402. When utilizing BLAST and Gapped BLAST programs, the default parameters of the respective programs (e.g., XBLAST and NBLAST) can be used. See ncbi.nlm.nih.gov.

[0164] It is understood that the molecules of the present invention may have additional conservative or non-essential amino acid substitutions, which do not have a substantial effect on their functions.

[0165] The term “amino acid” is intended to embrace all molecules, whether natural or synthetic, which include both an amino functionality and an acid functionality and capable of being included in a polymer of naturally-occurring amino acids. Exemplary amino acids include naturally-occurring amino acids; analogs, derivatives and congeners thereof; amino acid analogs having variant side chains; and all stereoisomers of any of any of the foregoing. As used herein the term “amino acid” includes both the D- or L-optical isomers and peptidomimetics.

[0166] A “conservative amino acid substitution” is one in which the amino acid residue is replaced with an amino acid residue having a similar side chain. Families of amino acid residues having similar side chains have been defined in the art. These families include amino acids with basic side chains (e.g., lysine, arginine, histidine), acidic side chains (e.g., aspartic acid, glutamic acid), uncharged polar side chains (e.g., glycine, asparagine, glutamine, serine, threonine, tyrosine, cysteine), nonpolar side chains (e.g., alanine, valine, leucine, isoleucine, proline, phenylalanine, methionine, tryptophan), beta-branched side chains (e.g., threonine, valine, isoleucine) and aromatic side chains (e.g., tyrosine, phenylalanine, tryptophan, histidine).

[0167] The terms “polypeptide”, “peptide” and “protein” (if single chain) are used interchangeably herein to refer to polymers of amino acids of any length. The polymer may be linear or branched, it may comprise modified amino acids, and it may be interrupted by non-amino acids. The terms also encompass an amino acid polymer that has been modified; for example, disulfide bond formation, glycosylation, lipidation, acetylation, phosphorylation, or any other manipulation, such as conjugation with a labeling component. The polypeptide can be isolated from natural sources, can be a produced by recombinant techniques from a eukaryotic or prokaryotic host, or can be a product of synthetic procedures.

[0168] The terms “nucleic acid,” “nucleic acid sequence,” “nucleotide sequence,” or “polynucleotide sequence,” and “polynucleotide” are used interchangeably. They refer to a polymeric form of nucleotides of any length, either deoxyribonucleotides or ribonucleotides, or analogs thereof. The polynucleotide may be either single-stranded or double-stranded, and if single-stranded may be the coding strand or non-coding (antisense) strand. A polynucleotide may comprise modified nucleotides, such as methylated nucleotides and nucleotide analogs. The sequence of nucleotides may be interrupted by non-nucleotide components. A polynucleotide may be further modified after polymerization, such as by conjugation with a labeling component. The nucleic acid may be a recombinant polynucleotide, or a polynucleotide of genomic, cDNA, semisynthetic, or synthetic origin which either does not occur in nature or is linked to another polynucleotide in a non-natural arrangement.

[0169] The term “isolated,” as used herein, refers to material that is removed from its original or native environment (e.g., the natural environment if it is naturally occurring). For example, a naturally-occurring polynucleotide or polypeptide present in a living animal is not isolated, but the same polynucleotide or polypeptide, separated by human intervention from some or all of the co-existing materials in the natural system, is isolated. Such polynucleotides could be part of a vector and/or such polynucleotides or polypeptides could be part of a composition, and still be isolated in that such vector or composition is not part of the environment in which it is found in nature.

[0170] Various aspects of the invention are described in further detail below. Additional definitions are set out throughout the specification.

### Natural Killer Cell Engagers

[0171] Natural Killer (NK) cells recognize and destroy tumors and virus-infected cells in an antibody-independent manner. The regulation of NK cells is mediated by activating and inhibiting receptors on the NK cell surface. One family of activating receptors is the natural cytotoxicity receptors (NCRs) which include NKp30, NKp44 and NKp46. The NCRs initiate tumor targeting by recognition of heparan sulfate on cancer cells. NKG2D is a receptor that provides both stimulatory and costimulatory innate immune responses on activated killer (NK) cells, leading to cytotoxic activity. DNAM1 is a receptor involved in intercellular adhesion, lymphocyte signaling, cytotoxicity and lymphokine secretion mediated by cytotoxic T-lymphocyte (CTL) and NK cell. DAP10 (also known as HCST) is a transmembrane adapter protein which associates with KLRK1 to form an activation receptor KLRK1-HCST in lymphoid and myeloid cells; this receptor plays a major role in triggering cytotoxicity against target cells expressing cell surface ligands such as MHC class I chain-related MICA and MICB, and U(optionally L1)6-binding proteins (ULBPs); it KLRK1-HCST receptor plays a role in immune surveillance against tumors and is required for cytolysis of tumors cells; indeed, melanoma cells that do not express KLRK1 ligands escape from immune surveillance mediated by NK cells. CD16 is a receptor for the Fc region of IgG, which binds complexed or aggregated IgG and also monomeric IgG and thereby mediates antibody-dependent cellular cytotoxicity (ADCC) and other antibody-dependent responses, such as phagocytosis.

[0172] The present disclosure provides, inter alia, antibody molecules, e.g., multispecific (e.g., bi-, tri-, quad-specific) or multifunctional molecules, that are engineered to contain one or more NK cell engagers that mediate binding to and/or activation of an NK cell. Accordingly, in some embodiments, the NK cell engager is selected from an antigen binding domain or ligand that binds to (e.g., activates): NKp30, NKp40, NKp44, NKp46, NKG2D, DNAM1, DAP10, CD16 (e.g., CD16a, CD16b, or both), CRTAM, CD27, PSGL1, CD96, CD100 (SEMA4D), NKp80, CD244 (also known as SLAMF4 or 2B4), SLAMF6, SLAMF7, KIR2DS2, KIR2DS4, KIR3DS1, KIR2DS3, KIR2DS5, KIR2DS1, CD94, NKG2C, NKG2E, or CD160.

[0173] In some embodiments, the NK cell engager is an antigen binding domain that binds to NKp30 (e.g., NKp30 present, e.g., expressed or displayed, on the surface of an NK cell) and comprises any CDR amino acid sequence, framework region (FWR) amino acid sequence, or variable region amino acid sequence disclosed in Tables 7-10. In some embodiments, the NK cell engager is an antigen binding domain that binds to NKp30 (e.g., NKp30 present, e.g., expressed or displayed, on the surface of an NK cell) and comprises any CDR amino acid sequence, framework region (FWR) amino acid sequence, or variable region amino acid sequence disclosed in U.S. Pat. Nos. 6,979,546, 9,447,185, PCT Application No. WO2015121383A1, PCT Application No. WO2016110468A1, PCT Application No. WO2004056392A1, or U.S. Application Publication No. US20070231322A1, the sequences of which are hereby incorporated by reference. In some embodiments, binding of the NK cell engager, e.g., antigen binding domain that binds to NKp30, to the NK cell activates the NK cell. An antigen binding domain that binds to NKp30 (e.g., NKp30 present, e.g., expressed or displayed, on the surface of an NK cell) may be said to target NKp30, the NK cell, or both.

[0174] In some embodiments, the antigen binding domain that binds to NKp30 comprises one or more CDRs (e.g., VHCDR1, VHCDR2, VHCDR3, VLCDR1, VLCDR2, and/or VLCDR3) disclosed in Table 7, Table 18, or Table 8, or a sequence having at least 85%, 90%, 95%, or 99% identity thereto. In some embodiments, the antigen binding domain that binds to NKp30 comprises one or more framework regions (e.g., VHFWR1, VHFWR2, VHFWR3, VHFWR4, VLFWR1, VLFWR2, VLFWR3, and/or VLFWR4) disclosed in Table 7, Table 18, or Table 8, or a sequence having at least 85%, 90%, 95%, or 99% identity thereto. In some embodiments, the antigen binding domain that binds to NKp30 comprises a VH and/or a VL disclosed in Table 9, or a sequence having at least 85%, 90%, 95%, or 99% identity thereto. In some embodiments, any of the VH domains disclosed in Table 9 may be paired with any of the VL domains disclosed in Table 9 to form the antigen binding domain that binds to NKp30. In some embodiments, the antigen binding domain that binds to NKp30 comprises an amino acid sequence disclosed in Table 10, or a sequence having at least 85%, 90%, 95%, or 99% identity thereto.

[0175] In some embodiments, the antigen binding domain that binds to NKp30 comprises a VH comprising a heavy chain complementarity determining region 1 (VHCDR1), a VHCDR2, and a VHCDR3, and a VL comprising a light chain complementarity determining region 1 (VLCDR1), a VLCDR2, and a VLCDR3.

[0176] In some embodiments, the VHCDR1, VHCDR2, and VHCDR3 comprise the amino acid sequences of SEQ ID NOs: 7313, 6001, and 7315, respectively (or a sequence having at least 85%, 90%, 95%, or 99% identity thereto). In some embodiments, the VHCDR1, VHCDR2, and VHCDR3 comprise the amino acid sequences of SEQ ID NOs: 7313, 6001, and 6002, respectively (or a sequence having at least 85%, 90%, 95%, or 99% identity thereto). In some embodiments, the VHCDR1, VHCDR2, and VHCDR3 comprise the amino acid sequences of SEQ ID NOs: 7313, 6008, and 6009, respectively (or a sequence having at least 85%, 90%, 95%, or 99% identity thereto). In some embodiments, the VHCDR1, VHCDR2, and VHCDR3 comprise the amino acid sequences of SEQ ID NOs: 7313, 7385, and 7315, respectively (or a sequence having at least 85%, 90%, 95%, or 99% identity thereto). In some embodiments, the VHCDR1, VHCDR2, and VHCDR3 comprise the amino acid sequences of SEQ ID NOs: 7313, 7318, and 6009, respectively (or a sequence having at least 85%, 90%, 95%, or 99% identity thereto).

[0177] In some embodiments, the VLCDR1, VLCDR2, and VLCDR3 comprise the amino acid sequences of SEQ ID NOs: 7326, 7327, and 7329, respectively (or a sequence having at least 85%, 90%, 95%, or 99% identity thereto). In some embodiments, the VLCDR1, VLCDR2, and VLCDR3 comprise the amino acid sequences of SEQ ID NOs: 6063, 6064, and 7293, respectively (or a sequence having at least 85%, 90%, 95%, or 99% identity thereto). In some embodiments, the VLCDR1, VLCDR2, and VLCDR3 comprise the amino acid sequences of SEQ ID NOs: 6070, 6071, and 6072, respectively (or a sequence having at least 85%, 90%, 95%, or 99% identity thereto). In some embodiments, the VLCDR1, VLCDR2, and VLCDR3 comprise the amino acid sequences of SEQ ID NOs: 6070, 6064, and 7321, respectively (or a sequence having at least 85%, 90%, 95%, or 99% identity thereto).

[0178] In some embodiments, the VHCDR1, VHCDR2, VHCDR3, VLCDR1, VLCDR2, and VLCDR3 comprise the amino acid sequences of SEQ ID NOs: 7313, 6001, 7315, 7326, 7327, and 7329, respectively (or a sequence having at least 85%, 90%, 95%, or 99% identity thereto). In some embodiments, the VHCDR1, VHCDR2, VHCDR3, VLCDR1, VLCDR2, and VLCDR3 comprise the amino acid sequences of SEQ ID NOs: 7313, 6001, 6002, 6063, 6064, and 7293, respectively (or a sequence having at least 85%, 90%, 95%, or 99% identity thereto). In some embodiments, the VHCDR1, VHCDR2, VHCDR3, VLCDR1, VLCDR2, and VLCDR3 comprise the amino acid sequences of SEQ ID NOs: 7313, 6008, 6009, 6070, 6071, and 6072, respectively (or a sequence having at least 85%, 90%, 95%, or 99% identity thereto). In some embodiments, the VHCDR1, VHCDR2, VHCDR3, VLCDR1, VLCDR2, and VLCDR3 comprise the amino acid sequences of SEQ ID NOs: 7313, 7385, 7315, 6070, 6064, and 7321, respectively (or a sequence having at least 85%, 90%, 95%, or 99% identity thereto). In some embodiments, the VHCDR1, VHCDR2, VHCDR3, VLCDR1, VLCDR2, and VLCDR3 comprise the amino acid sequences of SEQ ID NOs: 7313, 7318, 6009, 6070, 6064, and 7321, respectively (or a sequence having at least 85%, 90%, 95%, or 99% identity thereto).

[0179] In some embodiments, the VH comprises an amino acid sequence selected from the group consisting of SEQ ID NOs: 7298 or 7300-7304 (or a sequence having at least 85%, 90%, 95%, or 99% identity thereto) and/or the VL comprises an amino acid sequence selected from the group consisting of SEQ ID NOs: 7299 or 7305-7309 (or a sequence having at least 85%, 90%, 95%, or 99% identity thereto). In some embodiments, the VH and VL comprise the amino acid sequences of SEQ ID NOs: 7302 and 7305, respectively (or a sequence having at least 85%, 90%, 95%, or 99% identity thereto). In some embodiments, the VH and VL comprise the amino acid sequences of SEQ ID NOs: 7302 and 7309, respectively (or a sequence having at least 85%, 90%, 95%, or 99% identity thereto).

[0180] In some embodiments, the VH comprises an amino acid sequence selected from the group consisting of SEQ ID NOs: 6121 or 6123-6128 (or a sequence having at least 85%, 90%, 95%, or 99% identity thereto) and/or the VL comprises an amino acid sequence selected from the group consisting of SEQ ID NOs: 7294 or 6137-6141 (or a sequence having at least 85%, 90%, 95%, or 99% identity thereto). In some embodiments, the VH comprises an amino acid sequence selected from the group consisting of SEQ ID NOs: 6122 or 6129-6134 (or a sequence having at least 85%, 90%, 95%, or 99% identity thereto) and/or the VL comprises an amino acid sequence selected from the group consisting of SEQ ID NOs: 6136 or 6142-6147 (or a sequence having at least 85%, 90%, 95%, or 99% identity thereto). In some embodiments, the VH and VL comprise the amino acid sequences of SEQ ID NOs: 7295 and 7296, respectively (or a sequence having at least 85%, 90%, 95%, or 99% identity thereto). In some embodiments, the VH and VL comprise the amino acid sequences of SEQ ID NOs: 7297 and 7296, respectively (or a sequence having at least 85%, 90%, 95%, or 99% identity thereto). In some embodiments, the VH and VL comprise the amino acid sequences of SEQ ID NOs: 6122 and 6136, respectively (or a sequence having at least 85%, 90%, 95%, or 99% identity thereto).

[0181] In some embodiments, the antigen binding domain that binds to NKp30 comprises the amino acid sequence of SEQ ID NO: 7310 (or a sequence having at least 85%, 90%, 95%, or 99% identity thereto). In some embodiments, the antigen binding domain that binds to NKp30 comprises the amino acid sequence of SEQ ID NO: 7311 (or a sequence having at least 85%, 90%, 95%, or 99% identity thereto). In some embodiments, the antigen binding domain that binds to NKp30 comprises the amino acid sequence of SEQ ID NO: 6187, 6188, 6189 or 6190 (or a sequence having at least 85%, 90%, 95%, or 99% identity thereto).

[0182] In some embodiments, the antigen binding domain that targets NKp30 comprises a VH comprising a heavy chain complementarity determining region 1 (VHCDR1) amino acid sequence of SEQ ID NO: 6000 (or a sequence with no more than 1, 2, 3, or 4 mutations, e.g., substitutions, additions, or deletions), a VHCDR2 amino acid sequence of SEQ ID NO: 6001 (or a sequence with no more than 1, 2, 3, or 4 mutations, e.g., substitutions, additions, or deletions), and/or a VHCDR3 amino acid sequence of SEQ ID NO: 6002 (or a sequence with no more than 1, 2, 3, or 4 mutations, e.g., substitutions, additions, or deletions). In some embodiments, the NKp30 antigen binding domain comprises a VH comprising a VHCDR1 amino acid sequence of SEQ ID NO: 6000, a VHCDR2 amino acid sequence of SEQ ID NO: 6001, and/or a VHCDR3 amino acid sequence of SEQ ID NO: 6002.

[0183] In some embodiments, the antigen binding domain that targets NKp30 comprises a VL comprising a light chain complementarity determining region 1 (VLCDR1) amino acid sequence of SEQ ID NO: 6063 (or a sequence with no more than 1, 2, 3, or 4 mutations, e.g., substitutions, additions, or deletions), a VLCDR2 amino acid sequence of SEQ ID NO: 6064 (or a sequence with no more than 1, 2, 3, or 4 mutations, e.g., substitutions, additions, or deletions), and/or a VLCDR3 amino acid sequence of SEQ ID NO: 7293 (or a sequence with no more than 1, 2, 3, or 4 mutations, e.g., substitutions, additions, or deletions). In some embodiments, the antigen binding domain that targets NKp30 comprises a VL comprising a VLCDR1 amino acid sequence of SEQ ID NO: 6063, a VLCDR2 amino acid sequence of SEQ ID NO: 6064, and a VLCDR3 amino acid sequence of SEQ ID NO: 7293.

[0184] In some embodiments, the antigen binding domain that targets NKp30 comprises a VH comprising a heavy chain complementarity determining region 1 (VHCDR1) amino acid sequence of SEQ ID NO: 6000 (or a sequence with no more than 1, 2, 3, or 4 mutations, e.g., substitutions, additions, or deletions), a VHCDR2 amino acid sequence of SEQ ID NO: 6001 (or a sequence with no more than 1, 2, 3, or 4 mutations, e.g., substitutions, additions, or deletions), and/or a VHCDR3 amino acid sequence of SEQ ID NO: 6002 (or a sequence with no more than 1, 2, 3, or 4 mutations, e.g., substitutions, additions, or deletions), and a VL comprising a light chain complementarity determining region 1 (VLCDR1) amino acid sequence of SEQ ID NO: 6063 (or a sequence with no more than 1, 2, 3, or 4 mutations, e.g., substitutions, additions, or deletions), a VLCDR2 amino acid sequence of SEQ ID NO: 6064 (or a sequence with no more than 1, 2, 3, or 4 mutations, e.g., substitutions, additions, or deletions), and/or a VLCDR3 amino acid sequence of SEQ ID NO: 7293 (or a sequence with no more than 1, 2, 3, or 4 mutations, e.g., substitutions, additions, or deletions). In some embodiments, the NKp30 antigen binding domain comprises a VH comprising a VHCDR1 amino acid sequence of SEQ ID NO: 6000, a VHCDR2 amino acid sequence of SEQ ID NO: 6001, and/or a VHCDR3 amino acid sequence of SEQ ID NO: 6002, and a VL comprising a VLCDR1 amino acid sequence of SEQ ID NO: 6063, a VLCDR2 amino acid sequence of SEQ ID NO: 6064, and a VLCDR3 amino acid sequence of SEQ ID NO: 7293.

[0185] In some embodiments, the antigen binding domain that targets NKp30 comprises a VH comprising a heavy chain complementarity determining region 1 (VHCDR1) amino acid sequence of SEQ ID NO: 6007 (or a sequence with no more than 1, 2, 3, or 4 mutations, e.g., substitutions, additions, or deletions), a VHCDR2 amino acid sequence of SEQ ID NO: 6008 (or a sequence with no more than 1, 2, 3, or 4 mutations, e.g., substitutions, additions, or deletions), and/or a VHCDR3 amino acid sequence of SEQ ID NO: 6009 (or a sequence with no more than 1, 2, 3, or 4 mutations, e.g., substitutions, additions, or deletions). In some embodiments, the NKp30 antigen binding domain comprises a VH comprising a VHCDR1 amino acid sequence of SEQ ID NO: 6007, a VHCDR2 amino acid sequence of SEQ ID NO: 6008, and/or a VHCDR3 amino acid sequence of SEQ ID NO: 6009.

[0186] In some embodiments, the antigen binding domain that targets NKp30 comprises a VL comprising a light chain complementarity determining region 1 (VLCDR1) amino acid sequence of SEQ ID NO: 6070 (or a sequence with no more than 1, 2, 3, or 4 mutations, e.g., substitutions, additions, or deletions), a VLCDR2 amino acid sequence of SEQ ID NO: 6071 (or a sequence with no more than 1, 2, 3, or 4 mutations, e.g., substitutions, additions, or deletions), and/or a VLCDR3 amino acid sequence of SEQ ID NO: 6072 (or a sequence with no more than 1, 2, 3, or 4 mutations, e.g., substitutions, additions, or deletions). In some embodiments, the antigen binding domain that targets NKp30 comprises a VL comprising a VLCDR1 amino acid sequence of SEQ ID NO: 6070, a VLCDR2 amino acid sequence of SEQ ID NO: 6071, and a VLCDR3 amino acid sequence of SEQ ID NO: 6072.

[0187] In some embodiments, the antigen binding domain that targets NKp30 comprises a VH comprising a heavy chain complementarity determining region 1 (VHCDR1) amino acid sequence of SEQ ID NO: 6007 (or a sequence with no more than 1, 2, 3, or 4 mutations, e.g., substitutions, additions, or deletions), a VHCDR2 amino acid sequence of SEQ ID NO: 6008 (or a sequence with no more than 1, 2, 3, or 4 mutations, e.g., substitutions, additions, or deletions), and/or a VHCDR3 amino acid sequence of SEQ ID NO: 6009 (or a sequence with no more than 1, 2, 3, or 4 mutations, e.g., substitutions, additions, or deletions), and a VL comprising a light chain complementarity determining region 1 (VLCDR1) amino acid sequence of SEQ ID NO: 6070 (or a sequence with no more than 1, 2, 3, or 4 mutations, e.g., substitutions, additions, or deletions), a VLCDR2 amino acid sequence of SEQ ID NO: 6071 (or a sequence with no more than 1, 2, 3, or 4 mutations, e.g., substitutions, additions, or deletions), and/or a VLCDR3 amino acid sequence of SEQ ID NO: 6072 (or a sequence with no more than 1, 2, 3, or 4 mutations, e.g., substitutions, additions, or deletions). In some embodiments, the NKp30 antigen binding domain comprises a VH comprising a VHCDR1 amino acid sequence of SEQ ID NO: 6007, a VHCDR2 amino acid sequence of SEQ ID NO: 6008, and/or a VHCDR3 amino acid sequence of SEQ ID NO: 6009, and a VL comprising a VLCDR1 amino acid sequence of SEQ ID NO: 6070, a VLCDR2 amino acid sequence of SEQ ID NO: 6071, and a VLCDR3 amino acid sequence of SEQ ID NO: 6072.

[0188] In some embodiments, the antigen binding domain that targets NKp30 comprises a VH comprising a heavy chain framework region 1 (VHFWR1) amino acid sequence of SEQ ID NO: 6003, a VHFWR2 amino acid sequence of SEQ ID NO: 6004, a VHFWR3 amino acid sequence of SEQ ID NO: 6005, and/or a VHFWR4 amino acid sequence of SEQ ID NO: 6006.

[0189] In some embodiments, the antigen binding domain that targets NKp30 comprises a VL comprising a light chain framework region 1 (VLFWR1) amino acid sequence of SEQ ID NO: 6066, a VLFWR2 amino acid sequence of SEQ ID NO: 6067, a VLFWR3 amino acid sequence of SEQ ID NO: 7292, and/or a VLFWR4 amino acid sequence of SEQ ID NO: 6069.

[0190] In some embodiments, the antigen binding domain that targets NKp30 comprises a VH comprising a heavy chain framework region 1 (VHFWR1) amino acid sequence of SEQ ID NO: 6003, a VHFWR2 amino acid sequence of SEQ ID NO: 6004, a VHFWR3 amino acid sequence of SEQ ID NO: 6005, and/or a VHFWR4 amino acid sequence of SEQ ID NO: 6006, and a VL comprising a light chain framework region 1 (VLFWR1) amino acid sequence of SEQ ID NO: 6066, a VLFWR2 amino acid sequence of SEQ ID NO: 6067, a VLFWR3 amino acid sequence of SEQ ID NO: 7292, and/or a VLFWR4 amino acid sequence of SEQ ID NO: 6069.

[0191] In some embodiments, the antigen binding domain that targets NKp30 comprises a VH comprising a VHFWR1 amino acid sequence of SEQ ID NO: 6003 (or a sequence with no more than 1, 2, 3, 4, 5, or 6 mutations, e.g., substitutions, additions, or deletions, therefrom), a VHFWR2 amino acid sequence of SEQ ID NO: 6004 (or a sequence with no more than 1, 2, 3, 4, 5, or 6 mutations, e.g., substitutions, additions, or deletions, therefrom), a VHFWR3 amino acid sequence of SEQ ID NO: 6005 (or a sequence with no more than 1, 2, 3, 4, 5, 6, 7, 8, 9, 10, or 11 mutations, e.g., substitutions, additions, or deletions), and/or a VHFWR4 amino acid sequence of SEQ ID NO: 6006.

[0192] In some embodiments, the antigen binding domain that targets NKp30 comprises a VL comprising a VLFWR1 amino acid sequence of SEQ ID NO: 6066 (or a sequence with no more than 1, 2, or 3 mutations, e.g., substitutions, additions, or deletions), a VLFWR2 amino acid sequence of SEQ ID NO: 6067 (or a sequence with no more than 1 mutation, e.g., substitution, addition, or deletion), a VLFWR3 amino acid sequence of SEQ ID NO: 7292 (or a sequence with no more than 1 mutation, e.g., substitution, addition, or deletion), and/or a VLFWR4 amino acid sequence of SEQ ID NO: 6069.

[0193] In some embodiments, the antigen binding domain that targets NKp30 comprises a VH comprising a VHFWR1 amino acid sequence of SEQ ID NO: 6003 (or a sequence with no more than 1, 2, 3, 4, 5, or 6 mutations, e.g., substitutions, additions, or deletions, therefrom), a VHFWR2 amino acid sequence of SEQ ID NO: 6004 (or a sequence with no more than 1, 2, 3, 4, 5, or 6 mutations, e.g., substitutions, additions, or deletions, therefrom), a VHFWR3 amino acid sequence of SEQ ID NO: 6005 (or a sequence with no more than 1, 2, 3, 4, 5, 6, 7, 8, 9, 10, or 11 mutations, e.g., substitutions, additions, or deletions), and/or a VHFWR4 amino acid sequence of SEQ ID NO: 6006, and a VL comprising a VLFWR1 amino acid sequence of SEQ ID NO: 6066 (or a sequence with no more than 1, 2, or 3 mutations, e.g., substitutions, additions, or deletions), a VLFWR2 amino acid sequence of SEQ ID NO: 6067 (or a sequence with no more than 1 mutation, e.g., substitution, addition, or deletion), a VLFWR3 amino acid sequence of SEQ ID NO: 7292 (or a sequence with no more than 1 mutation, e.g., substitution, addition, or deletion), and/or a VLFWR4 amino acid sequence of SEQ ID NO: 6069.

[0194] In some embodiments, the antigen binding domain that targets NKp30 comprises a VH comprising a heavy chain framework region 1 (VHFWR1) amino acid sequence of SEQ ID NO: 6010, a VHFWR2 amino acid sequence of SEQ ID NO: 6011, a VHFWR3 amino acid sequence of SEQ ID NO: 6012, and/or a VHFWR4 amino acid sequence of SEQ ID NO: 6013.

[0195] In some embodiments, the antigen binding domain that targets NKp30 comprises a VL comprising a light chain framework region 1 (VLFWR1) amino acid sequence of SEQ ID NO: 6073, a VLFWR2 amino acid sequence of SEQ ID NO: 6074, a VLFWR3 amino acid sequence of SEQ ID NO: 6075, and/or a VLFWR4 amino acid sequence of SEQ ID NO: 6076.

[0196] In some embodiments, the antigen binding domain that targets NKp30 comprises a VH comprising a heavy chain framework region 1 (VHFWR1) amino acid sequence of SEQ ID NO: 6010, a VHFWR2 amino acid sequence of SEQ ID NO: 6011, a VHFWR3 amino acid sequence of SEQ ID NO: 6012, and/or a VHFWR4 amino acid sequence of SEQ ID NO: 6013, and a VL comprising a light chain framework region 1 (VLFWR1) amino acid sequence of SEQ ID NO: 6073, a VLFWR2 amino acid sequence of SEQ ID NO: 6074, a VLFWR3 amino acid sequence of SEQ ID NO: 6075, and/or a VLFWR4 amino acid sequence of SEQ ID NO: 6076.

[0197] In some embodiments, the antigen binding domain that targets NKp30 comprises a VH comprising a VHFWR1 amino acid sequence of SEQ ID NO: 6010 (or a sequence with no more than 1, 2, 3, 4, 5, or 6 mutations, e.g., substitutions, additions, or deletions, therefrom), a VHFWR2 amino acid sequence of SEQ ID NO: 6011 (or a sequence with no more than 1, 2, 3, 4, 5, or 6 mutations, e.g., substitutions, additions, or deletions, therefrom), a VHFWR3 amino acid sequence of SEQ ID NO: 6012 (or a sequence with no more than 1, 2, 3, 4, 5, 6, 7, 8, 9, 10, or 11 mutations, e.g., substitutions, additions, or deletions), and/or a VHFWR4 amino acid sequence of SEQ ID NO: 6013.

[0198] In some embodiments, the antigen binding domain that targets NKp30 comprises a VL comprising a VLFWR1 amino acid sequence of SEQ ID NO: 6073 (or a sequence with no more than 1, 2, or 3 mutations, e.g., substitutions, additions, or deletions), a VLFWR2 amino acid sequence of SEQ ID NO: 6074 (or a sequence with no more than 1 mutation, e.g., substitution, addition, or deletion), a VLFWR3 amino acid sequence of SEQ ID NO: 6075 (or a sequence with no more than 1 mutation, e.g., substitution, addition, or deletion), and/or a VLFWR4 amino acid sequence of SEQ ID NO: 6076.

[0199] In some embodiments, the antigen binding domain that targets NKp30 comprises a VH comprising a VHFWR1 amino acid sequence of SEQ ID NO: 6010 (or a sequence with no more than 1, 2, 3, 4, 5, or 6 mutations, e.g., substitutions, additions, or deletions, therefrom), a VHFWR2 amino acid sequence of SEQ ID NO: 6011 (or a sequence with no more than 1, 2, 3, 4, 5, or 6 mutations, e.g., substitutions, additions, or deletions, therefrom), a VHFWR3 amino acid sequence of SEQ ID NO: 6012 (or a sequence with no more than 1, 2, 3, 4, 5, 6, 7, 8, 9, 10, or 11 mutations, e.g., substitutions, additions, or deletions), and/or a VHFWR4 amino acid sequence of SEQ ID NO: 6013, and a VL comprising a VLFWR1 amino acid sequence of SEQ ID NO: 6073 (or a sequence with no more than 1, 2, or 3 mutations, e.g., substitutions, additions, or deletions), a VLFWR2 amino acid sequence of SEQ ID NO: 6074 (or a sequence with no more than 1 mutation, e.g., substitution, addition, or deletion), a VLFWR3 amino acid sequence of SEQ ID NO: 6075 (or a sequence with no more than 1 mutation, e.g., substitution, addition, or deletion), and/or a VLFWR4 amino acid sequence of SEQ ID NO: 6076.

[0200] In some embodiments, the antigen binding domain that targets NKp30 comprises a VH comprising a heavy chain framework region 1 (VHFWR1) amino acid sequence of SEQ ID NO: 6014, a VHFWR2 amino acid sequence of SEQ ID NO: 6015, a VHFWR3 amino acid sequence of SEQ ID NO: 6016, and/or a VHFWR4 amino acid sequence of SEQ ID NO: 6017.

[0201] In some embodiments, the antigen binding domain that targets NKp30 comprises a VH comprising a VHFWR1 amino acid sequence of SEQ ID NO: 6014 (or a sequence with no more than 1, 2, 3, 4, 5, or 6 mutations, e.g., substitutions, additions, or deletions, therefrom), a VHFWR2 amino acid sequence of SEQ ID NO: 6015 (or a sequence with no more than 1, 2, 3, 4, 5, or 6 mutations, e.g., substitutions, additions, or deletions, therefrom), a VHFWR3 amino acid sequence of SEQ ID NO: 6016 (or a sequence with no more than 1, 2, 3, 4, 5, 6, 7, 8, 9, 10, or 11 mutations, e.g., substitutions, additions, or deletions), and/or a VHFWR4 amino acid sequence of SEQ ID NO: 6017.

[0202] In some embodiments, the antigen binding domain that targets NKp30 comprises a VL comprising a light chain framework region 1 (VLFWR1) amino acid sequence of SEQ ID NO: 6077, a VLFWR2 amino acid sequence of SEQ ID NO: 6078, a VLFWR3 amino acid sequence of SEQ ID NO: 6079, and/or a VLFWR4 amino acid sequence of SEQ ID NO: 6080.

[0203] In some embodiments, the antigen binding domain that targets NKp30 comprises a VL comprising a VLFWR1 amino acid sequence of SEQ ID NO: 6077 (or a sequence with no more than 1, 2, or 3 mutations, e.g., substitutions, additions, or deletions), a VLFWR2 amino acid sequence of SEQ ID NO: 6078 (or a sequence with no more than 1 mutation, e.g., substitution, addition, or deletion), a VLFWR3 amino acid sequence of SEQ ID NO: 6079 (or a sequence with no more than 1 mutation, e.g., substitution, addition, or deletion), and/or a VLFWR4 amino acid sequence of SEQ ID NO: 6080.

[0204] In some embodiments, the antigen binding domain that targets NKp30 comprises a VH comprising a heavy chain framework region 1 (VHFWR1) amino acid sequence of SEQ ID NO: 6018, a VHFWR2 amino acid sequence of SEQ ID NO: 6019, a VHFWR3 amino acid sequence of SEQ ID NO: 6020, and/or a VHFWR4 amino acid sequence of SEQ ID NO: 6021.

[0205] In some embodiments, the antigen binding domain that targets NKp30 comprises a VH comprising a VHFWR1 amino acid sequence of SEQ ID NO: 6018 (or a sequence with no more than 1, 2, 3, 4, 5, or 6 mutations, e.g., substitutions, additions, or deletions, therefrom), a VHFWR2 amino acid sequence of SEQ ID NO: 6019 (or a sequence with no more than 1, 2, 3, 4, 5, or 6 mutations, e.g., substitutions, additions, or deletions, therefrom), a VHFWR3 amino acid sequence of SEQ ID NO: 6020 (or a sequence with no more than 1, 2, 3, 4, 5, 6, 7, 8, 9, 10, or 11 mutations, e.g., substitutions, additions, or deletions), and/or a VHFWR4 amino acid sequence of SEQ ID NO: 6021.

[0206] In some embodiments, the antigen binding domain that targets NKp30 comprises a VL comprising a light chain framework region 1 (VLFWR1) amino acid sequence of SEQ ID NO: 6081, a VLFWR2 amino acid sequence of SEQ ID NO: 6082, a VLFWR3 amino acid sequence of SEQ ID NO: 6083, and/or a VLFWR4 amino acid sequence of SEQ ID NO: 6084.

[0207] In some embodiments, the antigen binding domain that targets NKp30 comprises a VL comprising a VLFWR1 amino acid sequence of SEQ ID NO: 6081 (or a sequence with no more than 1, 2, or 3 mutations, e.g., substitutions, additions, or deletions), a VLFWR2 amino acid sequence of SEQ ID NO: 6082 (or a sequence with no more than 1 mutation, e.g., substitution, addition, or deletion), a VLFWR3 amino acid sequence of SEQ ID NO: 6083 (or a sequence with no more than 1 mutation, e.g., substitution, addition, or deletion), and/or a VLFWR4 amino acid sequence of SEQ ID NO: 6084.

[0208] In some embodiments, the antigen binding domain that targets NKp30 comprises a VH comprising a heavy chain framework region 1 (VHFWR1) amino acid sequence of SEQ ID NO: 6022, a VHFWR2 amino acid sequence of SEQ ID NO: 6023, a VHFWR3 amino acid sequence of SEQ ID NO: 6024, and/or a VHFWR4 amino acid sequence of SEQ ID NO: 6025.

[0209] In some embodiments, the antigen binding domain that targets NKp30 comprises a VH comprising a VHFWR1 amino acid sequence of SEQ ID NO: 6022 (or a sequence with no more than 1, 2, 3, 4, 5, or 6 mutations, e.g., substitutions, additions, or deletions, therefrom), a VHFWR2 amino acid sequence of SEQ ID NO: 6023 (or a sequence with no more than 1, 2, 3, 4, 5, or 6 mutations, e.g., substitutions, additions, or deletions, therefrom), a VHFWR3 amino acid sequence of SEQ ID NO: 6024 (or a sequence with no more than 1, 2, 3, 4, 5, 6, 7, 8, 9, 10, or 11 mutations, e.g., substitutions, additions, or deletions), and/or a VHFWR4 amino acid sequence of SEQ ID NO: 6025.

[0210] In some embodiments, the antigen binding domain that targets NKp30 comprises a VL comprising a light chain framework region 1 (VLFWR1) amino acid sequence of SEQ ID NO: 6085, a VLFWR2 amino acid sequence of SEQ ID NO: 6086, a VLFWR3 amino acid sequence of SEQ ID NO: 6087, and/or a VLFWR4 amino acid sequence of SEQ ID NO: 6088.

[0211] In some embodiments, the antigen binding domain that targets NKp30 comprises a VL comprising a VLFWR1 amino acid sequence of SEQ ID NO: 6085 (or a sequence with no more than 1, 2, or 3 mutations, e.g., substitutions, additions, or deletions), a VLFWR2 amino acid sequence of SEQ ID NO: 6086 (or a sequence with no more than 1 mutation, e.g., substitution, addition, or deletion), a VLFWR3 amino acid sequence of SEQ ID NO: 6087 (or a sequence with no more than 1 mutation, e.g., substitution, addition, or deletion), and/or a VLFWR4 amino acid sequence of SEQ ID NO: 6088.

[0212] In some embodiments, the antigen binding domain that targets NKp30 comprises a VH comprising a heavy chain framework region 1 (VHFWR1) amino acid sequence of SEQ ID NO: 6026, a VHFWR2 amino acid sequence of SEQ ID NO: 6027, a VHFWR3 amino acid sequence of SEQ ID NO: 6028, and/or a VHFWR4 amino acid sequence of SEQ ID NO: 6029.

[0213] In some embodiments, the antigen binding domain that targets NKp30 comprises a VH comprising a VHFWR1 amino acid sequence of SEQ ID NO: 6026 (or a sequence with no more than 1, 2, 3, 4, 5, or 6 mutations, e.g., substitutions, additions, or deletions, therefrom), a VHFWR2 amino acid sequence of SEQ ID NO: 6027 (or a sequence with no more than 1, 2, 3, 4, 5, or 6 mutations, e.g., substitutions, additions, or deletions, therefrom), a VHFWR3 amino acid sequence of SEQ ID NO: 6028 (or a sequence with no more than 1, 2, 3, 4, 5, 6, 7, 8, 9, 10, or 11 mutations, e.g., substitutions, additions, or deletions), and/or a VHFWR4 amino acid sequence of SEQ ID NO: 6029.

[0214] In some embodiments, the antigen binding domain that targets NKp30 comprises a VL comprising a light chain framework region 1 (VLFWR1) amino acid sequence of SEQ ID NO: 6089, a VLFWR2 amino acid sequence of SEQ ID NO: 6090, a VLFWR3 amino acid sequence of SEQ ID NO: 6091, and/or a VLFWR4 amino acid sequence of SEQ ID NO: 6092.

[0215] In some embodiments, the antigen binding domain that targets NKp30 comprises a VL comprising a VLFWR1 amino acid sequence of SEQ ID NO: 6089 (or a sequence with no more than 1, 2, or 3 mutations, e.g., substitutions, additions, or deletions), a VLFWR2 amino acid sequence of SEQ ID NO: 6090 (or a sequence with no more than 1 mutation, e.g., substitution, addition, or deletion), a VLFWR3 amino acid sequence of SEQ ID NO: 6091 (or a sequence with no more than 1 mutation, e.g., substitution, addition, or deletion), and/or a VLFWR4 amino acid sequence of SEQ ID NO: 6092.

[0216] In some embodiments, the antigen binding domain that targets NKp30 comprises a VH comprising a heavy chain framework region 1 (VHFWR1) amino acid sequence of SEQ ID NO: 6030, a VHFWR2 amino acid sequence of SEQ ID NO: 6032, a VHFWR3 amino acid sequence of SEQ ID NO: 6033, and/or a VHFWR4 amino acid sequence of SEQ ID NO: 6034.

[0217] In some embodiments, the antigen binding domain that targets NKp30 comprises a VH comprising a VHFWR1 amino acid sequence of SEQ ID NO: 6030 (or a sequence with no more than 1, 2, 3, 4, 5, or 6 mutations, e.g., substitutions, additions, or deletions, therefrom), a VHFWR2 amino acid sequence of SEQ ID NO: 6032 (or a sequence with no more than 1, 2, 3, 4, 5, or 6 mutations, e.g., substitutions, additions, or deletions, therefrom), a VHFWR3 amino acid sequence of SEQ ID NO: 6033 (or a sequence with no more than 1, 2, 3, 4, 5, 6, 7, 8, 9, 10, or 11 mutations, e.g., substitutions, additions, or deletions), and/or a VHFWR4 amino acid sequence of SEQ ID NO: 6034.

[0218] In some embodiments, the antigen binding domain that targets NKp30 comprises a VL comprising a light chain framework region 1 (VLFWR1) amino acid sequence of SEQ ID NO: 6093, a VLFWR2 amino acid sequence of SEQ ID NO: 6094, a VLFWR3 amino acid sequence of SEQ ID NO: 6095, and/or a VLFWR4 amino acid sequence of SEQ ID NO: 6096.

[0219] In some embodiments, the antigen binding domain that targets NKp30 comprises a VL comprising a VLFWR1 amino acid sequence of SEQ ID NO: 6093 (or a sequence with no more than 1, 2, or 3 mutations, e.g., substitutions, additions, or deletions), a VLFWR2 amino acid sequence of SEQ ID NO: 6094 (or a sequence with no more than 1 mutation, e.g., substitution, addition, or deletion), a VLFWR3 amino acid sequence of SEQ ID NO: 6095 (or a sequence with no more than 1 mutation, e.g., substitution, addition, or deletion), and/or a VLFWR4 amino acid sequence of SEQ ID NO: 6096.

[0220] In some embodiments, the antigen binding domain that targets NKp30 comprises a VH comprising a heavy chain framework region 1 (VHFWR1) amino acid sequence of SEQ ID NO: 6035, a VHFWR2 amino acid sequence of SEQ ID NO: 6036, a VHFWR3 amino acid sequence of SEQ ID NO: 6037, and/or a VHFWR4 amino acid sequence of SEQ ID NO: 6038.

[0221] In some embodiments, the antigen binding domain that targets NKp30 comprises a VH comprising a VHFWR1 amino acid sequence of SEQ ID NO: 6035 (or a sequence with no more than 1, 2, 3, 4, 5, or 6 mutations, e.g., substitutions, additions, or deletions, therefrom), a VHFWR2 amino acid sequence of SEQ ID NO: 6036 (or a sequence with no more than 1, 2, 3, 4, 5, or 6 mutations, e.g., substitutions, additions, or deletions, therefrom), a VHFWR3 amino acid sequence of SEQ ID NO: 6037 (or a sequence with no more than 1, 2, 3, 4, 5, 6, 7, 8, 9, 10, or 11 mutations, e.g., substitutions, additions, or deletions), and/or a VHFWR4 amino acid sequence of SEQ ID NO: 6038.

[0222] In some embodiments, the antigen binding domain that targets NKp30 comprises a VH comprising a heavy chain framework region 1 (VHFWR1) amino acid sequence of SEQ ID NO: 6039, a VHFWR2 amino acid sequence of SEQ ID NO: 6040, a VHFWR3 amino acid sequence of SEQ ID NO: 6041, and/or a VHFWR4 amino acid sequence of SEQ ID NO: 6042.

[0223] In some embodiments, the antigen binding domain that targets NKp30 comprises a VH comprising a VHFWR1 amino acid sequence of SEQ ID NO: 6039 (or a sequence with no more than 1, 2, 3, 4, 5, or 6 mutations, e.g., substitutions, additions, or deletions, therefrom), a VHFWR2 amino acid sequence of SEQ ID NO: 6040 (or a sequence with no more than 1, 2, 3, 4, 5, or 6 mutations, e.g., substitutions, additions, or deletions, therefrom), a VHFWR3 amino acid sequence of SEQ ID NO: 6041 (or a sequence with no more than 1, 2, 3, 4, 5, 6, 7, 8, 9, 10, or 11 mutations, e.g., substitutions, additions, or deletions), and/or a VHFWR4 amino acid sequence of SEQ ID NO: 6042.

[0224] In some embodiments, the antigen binding domain that targets NKp30 comprises a VL comprising a light chain framework region 1 (VLFWR1) amino acid sequence of SEQ ID NO: 6097, a VLFWR2 amino acid sequence of SEQ ID NO: 6098, a VLFWR3 amino acid sequence of SEQ ID NO: 6099, and/or a VLFWR4 amino acid sequence of SEQ ID NO: 6100.

[0225] In some embodiments, the antigen binding domain that targets NKp30 comprises a VL comprising a VLFWR1 amino acid sequence of SEQ ID NO: 6097 (or a sequence with no more than 1, 2, or 3 mutations, e.g., substitutions, additions, or deletions), a VLFWR2 amino acid sequence of SEQ ID NO: 6098 (or a sequence with no more than 1 mutation, e.g., substitution, addition, or deletion), a VLFWR3 amino acid sequence of SEQ ID NO: 6099 (or a sequence with no more than 1 mutation, e.g., substitution, addition, or deletion), and/or a VLFWR4 amino acid sequence of SEQ ID NO: 6100.

[0226] In some embodiments, the antigen binding domain that targets NKp30 comprises a VH comprising a heavy chain framework region 1 (VHFWR1) amino acid sequence of SEQ ID NO: 6043, a VHFWR2 amino acid sequence of SEQ ID NO: 6044, a VHFWR3 amino acid sequence of SEQ ID NO: 6045, and/or a VHFWR4 amino acid sequence of SEQ ID NO: 6046.

[0227] In some embodiments, the antigen binding domain that targets NKp30 comprises a VH comprising a VHFWR1 amino acid sequence of SEQ ID NO: 6043 (or a sequence with no more than 1, 2, 3, 4, 5, or 6 mutations, e.g., substitutions, additions, or deletions, therefrom), a VHFWR2 amino acid sequence of SEQ ID NO: 6044 (or a sequence with no more than 1, 2, 3, 4, 5, or 6 mutations, e.g., substitutions, additions, or deletions, therefrom), a VHFWR3 amino acid sequence of SEQ ID NO: 6045 (or a sequence with no more than 1, 2, 3, 4, 5, 6, 7, 8, 9, 10, or 11 mutations, e.g., substitutions, additions, or deletions), and/or a VHFWR4 amino acid sequence of SEQ ID NO: 6046.

[0228] In some embodiments, the antigen binding domain that targets NKp30 comprises a VL comprising a light chain framework region 1 (VLFWR1) amino acid sequence of SEQ ID NO: 6101, a VLFWR2 amino acid sequence of SEQ ID NO: 6102, a VLFWR3 amino acid sequence of SEQ ID NO: 6103, and/or a VLFWR4 amino acid sequence of SEQ ID NO: 6104.

[0229] In some embodiments, the antigen binding domain that targets NKp30 comprises a VL comprising a VLFWR1 amino acid sequence of SEQ ID NO: 6101 (or a sequence with no more than 1, 2, or 3 mutations, e.g., substitutions, additions, or deletions), a VLFWR2 amino acid sequence of SEQ ID NO: 6102 (or a sequence with no more than 1 mutation, e.g., substitution, addition, or deletion), a VLFWR3 amino acid sequence of SEQ ID NO: 6103 (or a sequence with no more than 1 mutation, e.g., substitution, addition, or deletion), and/or a VLFWR4 amino acid sequence of SEQ ID NO: 6104.

[0230] In some embodiments, the antigen binding domain that targets NKp30 comprises a VH comprising a heavy chain framework region 1 (VHFWR1) amino acid sequence of SEQ ID NO: 6047, a VHFWR2 amino acid sequence of SEQ ID NO: 6048, a VHFWR3 amino acid sequence of SEQ ID NO: 6049, and/or a VHFWR4 amino acid sequence of SEQ ID NO: 6050.

[0231] In some embodiments, the antigen binding domain that targets NKp30 comprises a VH comprising a VHFWR1 amino acid sequence of SEQ ID NO: 6047 (or a sequence with no more than 1, 2, 3, 4, 5, or 6 mutations, e.g., substitutions, additions, or deletions, therefrom), a VHFWR2 amino acid sequence of SEQ ID NO: 6048 (or a sequence with no more than 1, 2, 3, 4, 5, or 6 mutations, e.g., substitutions, additions, or deletions, therefrom), a VHFWR3 amino acid sequence of SEQ ID NO: 6049 (or a sequence with no more than 1, 2, 3, 4, 5, 6, 7, 8, 9, 10, or 11 mutations, e.g., substitutions, additions, or deletions), and/or a VHFWR4 amino acid sequence of SEQ ID NO: 6050.

[0232] In some embodiments, the antigen binding domain that targets NKp30 comprises a VL comprising a light chain framework region 1 (VLFWR1) amino acid sequence of SEQ ID NO: 6105, a VLFWR2 amino acid sequence of SEQ ID NO: 6106, a VLFWR3 amino acid sequence of SEQ ID NO: 6107, and/or a VLFWR4 amino acid sequence of SEQ ID NO: 6108.

[0233] In some embodiments, the antigen binding domain that targets NKp30 comprises a VL comprising a VLFWR1 amino acid sequence of SEQ ID NO: 6105 (or a sequence with no more than 1, 2, or 3 mutations, e.g., substitutions, additions, or deletions), a VLFWR2 amino acid sequence of SEQ ID NO: 6106 (or a sequence with no more than 1 mutation, e.g., substitution, addition, or deletion), a VLFWR3 amino acid sequence of SEQ ID NO: 6107 (or a sequence with no more than 1 mutation, e.g., substitution, addition, or deletion), and/or a VLFWR4 amino acid sequence of SEQ ID NO: 6108.

[0234] In some embodiments, the antigen binding domain that targets NKp30 comprises a VH comprising a heavy chain framework region 1 (VHFWR1) amino acid sequence of SEQ ID NO: 6051, a VHFWR2 amino acid sequence of SEQ ID NO: 6052, a VHFWR3 amino acid sequence of SEQ ID NO: 6053, and/or a VHFWR4 amino acid sequence of SEQ ID NO: 6054.

[0235] In some embodiments, the antigen binding domain that targets NKp30 comprises a VH comprising a VHFWR1 amino acid sequence of SEQ ID NO: 6051 (or a sequence with no more than 1, 2, 3, 4, 5, or 6 mutations, e.g., substitutions, additions, or deletions, therefrom), a VHFWR2 amino acid sequence of SEQ ID NO: 6052 (or a sequence with no more than 1, 2, 3, 4, 5, or 6 mutations, e.g., substitutions, additions, or deletions, therefrom), a VHFWR3 amino acid sequence of SEQ ID NO: 6053 (or a sequence with no more than 1, 2, 3, 4, 5, 6, 7, 8, 9, 10, or 11 mutations, e.g., substitutions, additions, or deletions), and/or a VHFWR4 amino acid sequence of SEQ ID NO: 6054.

[0236] In some embodiments, the antigen binding domain that targets NKp30 comprises a VL comprising a light chain framework region 1 (VLFWR1) amino acid sequence of SEQ ID NO: 6109, a VLFWR2 amino acid sequence of SEQ ID NO: 6110, a VLFWR3 amino acid sequence of SEQ ID NO: 6111, and/or a VLFWR4 amino acid sequence of SEQ ID NO: 6112.

[0237] In some embodiments, the antigen binding domain that targets NKp30 comprises a VL comprising a VLFWR1 amino acid sequence of SEQ ID NO: 6109 (or a sequence with no more than 1, 2, or 3 mutations, e.g., substitutions, additions, or deletions), a VLFWR2 amino acid sequence of SEQ ID NO: 6110 (or a sequence with no more than 1 mutation, e.g., substitution, addition, or deletion), a VLFWR3 amino acid sequence of SEQ ID NO: 6111 (or a sequence with no more than 1 mutation, e.g., substitution, addition, or deletion), and/or a VLFWR4 amino acid sequence of SEQ ID NO: 6112.

[0238] In some embodiments, the antigen binding domain that targets NKp30 comprises a VH comprising a heavy chain framework region 1 (VHFWR1) amino acid sequence of SEQ ID NO: 6055, a VHFWR2 amino acid sequence of SEQ ID NO: 6056, a VHFWR3 amino acid sequence of SEQ ID NO: 6057, and/or a VHFWR4 amino acid sequence of SEQ ID NO: 6058.

[0239] In some embodiments, the antigen binding domain that targets NKp30 comprises a VH comprising a VHFWR1 amino acid sequence of SEQ ID NO: 6055 (or a sequence with no more than 1, 2, 3, 4, 5, or 6 mutations, e.g., substitutions, additions, or deletions, therefrom), a VHFWR2 amino acid sequence of SEQ ID NO: 6056 (or a sequence with no more than 1, 2, 3, 4, 5, or 6 mutations, e.g., substitutions, additions, or deletions, therefrom), a VHFWR3 amino acid sequence of SEQ ID NO: 6057 (or a sequence with no more than 1, 2, 3, 4, 5, 6, 7, 8, 9, 10, or 11 mutations, e.g., substitutions, additions, or deletions), and/or a VHFWR4 amino acid sequence of SEQ ID NO: 6058.

[0240] In some embodiments, the antigen binding domain that targets NKp30 comprises a VL comprising a light chain framework region 1 (VLFWR1) amino acid sequence of SEQ ID NO: 6113, a VLFWR2 amino acid sequence of SEQ ID NO: 6114, a VLFWR3 amino acid sequence of SEQ ID NO: 6115, and/or a VLFWR4 amino acid sequence of SEQ ID NO: 6116.

[0241] In some embodiments, the antigen binding domain that targets NKp30 comprises a VL comprising a VLFWR1 amino acid sequence of SEQ ID NO: 6113 (or a sequence with no more than 1, 2, or 3 mutations, e.g., substitutions, additions, or deletions), a VLFWR2 amino acid sequence of SEQ ID NO: 6114 (or a sequence with no more than 1 mutation, e.g., substitution, addition, or deletion), a VLFWR3 amino acid sequence of SEQ ID NO: 6115 (or a sequence with no more than 1 mutation, e.g., substitution, addition, or deletion), and/or a VLFWR4 amino acid sequence of SEQ ID NO: 6116.

[0242] In some embodiments, the antigen binding domain that targets NKp30 comprises a VH comprising a heavy chain framework region 1 (VHFWR1) amino acid sequence of SEQ ID NO: 6059, a VHFWR2 amino acid sequence of SEQ ID NO: 6060, a VHFWR3 amino acid sequence of SEQ ID NO: 6061, and/or a VHFWR4 amino acid sequence of SEQ ID NO: 6062.

[0243] In some embodiments, the antigen binding domain that targets NKp30 comprises a VH comprising a VHFWR1 amino acid sequence of SEQ ID NO: 6059 (or a sequence with no more than 1, 2, 3, 4, 5, or 6 mutations, e.g., substitutions, additions, or deletions, therefrom), a VHFWR2 amino acid sequence of SEQ ID NO: 6060 (or a sequence with no more than 1, 2, 3, 4, 5, or 6 mutations, e.g., substitutions, additions, or deletions, therefrom), a VHFWR3 amino acid sequence of SEQ ID NO: 6061 (or a sequence with no more than 1, 2, 3, 4, 5, 6, 7, 8, 9, 10, or 11 mutations, e.g., substitutions, additions, or deletions), and/or a VHFWR4 amino acid sequence of SEQ ID NO: 6062.

[0244] In some embodiments, the antigen binding domain that targets NKp30 comprises a VL comprising a light chain framework region 1 (VLFWR1) amino acid sequence of SEQ ID NO: 6117, a VLFWR2 amino acid sequence of SEQ ID NO: 6118, a VLFWR3 amino acid sequence of SEQ ID NO: 6119, and/or a VLFWR4 amino acid sequence of SEQ ID NO: 6120.

[0245] In some embodiments, the antigen binding domain that targets NKp30 comprises a VL comprising a VLFWR1 amino acid sequence of SEQ ID NO: 6117 (or a sequence with no more than 1, 2, or 3 mutations, e.g., substitutions, additions, or deletions), a VLFWR2 amino acid sequence of SEQ ID NO: 6118 (or a sequence with no more than 1 mutation, e.g., substitution, addition, or deletion), a VLFWR3 amino acid sequence of SEQ ID NO: 6119 (or a sequence with no more than 1 mutation, e.g., substitution, addition, or deletion), and/or a VLFWR4 amino acid sequence of SEQ ID NO: 6120.

[0246] In some embodiments, the antigen binding domain that targets NKp30 comprises a VH comprising the amino acid sequence of SEQ ID NO: 6148 (or an amino acid sequence having at least about 77%, 80%, 85%, 90%, 95%, or 99% sequence identity to SEQ ID NO: 6148). In some embodiments, the antigen binding domain that targets NKp30 comprises a VH comprising the amino acid sequence of SEQ ID NO: 6149 (or an amino acid sequence having at least about 77%, 80%, 85%, 90%, 95%, or 99% sequence identity to SEQ ID NO: 6149). In some embodiments, the antigen binding domain that targets NKp30 comprises a VL comprising the amino acid sequence of SEQ ID NO: 6150 (or an amino acid sequence having at least about 93%, 95%, or 99% sequence identity to SEQ ID NO: 6150). In some embodiments, antigen binding domain that targets NKp30 comprises a VH comprising the amino acid sequence of SEQ ID NO: 6148. In some embodiments, antigen binding domain that targets NKp30 comprises a VH comprising the amino acid sequence of SEQ ID NO: 6149. In some embodiments, the antigen binding domain that targets NKp30 comprises a VL comprising the amino acid sequence of SEQ ID NO: 6150.

[0247] In some embodiments, the antigen binding domain that targets NKp30 comprises a VH comprising the amino acid sequence of SEQ ID NO: 6148, and a VL comprising the amino acid sequence of SEQ ID NO: 6150. In some embodiments, the antigen binding domain that targets NKp30 comprises a VH comprising the amino acid sequence of SEQ ID NO: 6149, and a VL comprising the amino acid sequence of SEQ ID NO: 6150.

[0248] In some embodiments, the antigen binding domain that targets NKp30 comprises a VH comprising the amino acid sequence of SEQ ID NO: 6151 (or an amino acid sequence having at least about 77%, 80%, 85%, 90%, 95%, or 99% sequence identity to SEQ ID NO: 6151). In some embodiments, the antigen binding domain that targets NKp30 comprises a VH comprising the amino acid sequence of SEQ ID NO: 6152 (or an amino acid sequence having at least about 77%, 80%, 85%, 90%, 95%, or 99% sequence identity to SEQ ID NO: 6152). In some embodiments, the antigen binding domain that targets NKp30 comprises a VL comprising the amino acid sequence of SEQ ID NO: 6153 (or an amino acid sequence having at least about 93%, 95%, or 99% sequence identity to SEQ ID NO: 6153). In some embodiments, antigen binding domain that targets NKp30 comprises a VH comprising the amino acid sequence of SEQ ID NO: 6151. In some embodiments, antigen binding domain that targets NKp30 comprises a VH comprising the amino acid sequence of SEQ ID NO: 6152. In some embodiments, the antigen binding domain that targets NKp30 comprises a VL comprising the amino acid sequence of SEQ ID NO: 6153.

[0249] In some embodiments, the antigen binding domain that targets NKp30 comprises a VH comprising the amino acid sequence of SEQ ID NO: 6151, and a VL comprising the amino acid sequence of SEQ ID NO: 6153. In some embodiments, the antigen binding domain that targets NKp30 comprises a VH comprising the amino acid sequence of SEQ ID NO: 6152, and a VL comprising the amino acid sequence of SEQ ID NO: 6153.

[0250] In some embodiments, the antigen binding domain that targets NKp30 comprises an scFv. In some embodiments, the scFv comprises an amino acid sequence selected from SEQ ID NOs: 6187-6190, or an amino acid sequence having at least about 93%, 95%, or 99% sequence identity thereto.

TABLE 7
Exemplary heavy chain CDRs and FWRs of
NKp30-targeting antigen binding domains

| Ab ID | VHFWR1 | VHCDR1 | VHFWR2 | VHCDR2 | VHFWR3 | VHCDR3 | VHFWR4 |
|---|---|---|---|---|---|---|---|
| 9G1-HC | QIQLQESG | TGGYHW | WIRQFP | YIYSSGS | RISITRDT | GNWHYF | WGQGTM |
| | PGLVKPSQ | N (SEQ | GKKLEW | TSYNPSL | SKNQFFLQ | DF | VTVSS |
| | SLSLTCSV | ID NO: | MG | KS (SEQ | LNSVTTED | (SEQ | (SEQ |
| | TGFSIN | 6000) | (SEQ | ID NO: | TATYYCAR | ID NO: | ID NO: |
| | (SEQ ID | | ID NO: | 6001) | (SEQ ID | 6002) | 6006) |
| | NO: 6003) | | 6004) | | NO: 6005) | | |
| 15H6-HC | QIQLQESG | TGGYHW | WIRQFP | YIYSSGT | RISITRDT | GNWHYF | WGQGTL |
| | PGLVKPSQ | N (SEQ | GKKLEW | TRYNPSL | SKNQFFLQ | DY | VAVSS |
| | SLSLTCSV | ID NO: | MG | KS (SEQ | LNSVTPED | (SEQ | (SEQ |
| | TGFSIN | 6007) | (SEQ | ID NO: | TATYYCTR | ID NO: | ID NO: |
| | (SEQ ID | | ID NO: | 6008) | (SEQ ID | 6009) | 6013) |
| | NO: 6010) | | 6011) | | NO: 6012) | | |
| 9G1-HC_1 | QIQLQESG | TGGYHW | WIRQPA | YIYSSGS | RVTMSRDT | GNWHYF | WGQGTM |
| | PGLVKPSE | N (SEQ | GKGLEW | TSYNPSL | SKNQFSLK | DF | VTVSS |
| | TLSLTCTV | ID NO: | IG | KS (SEQ | LSSVTAAD | (SEQ | (SEQ |
| | SGFSIN | 6000) | (SEQ | ID NO: | TAVYYCAR | ID NO: | ID NO: |
| | (SEQ ID | | ID NO: | 6001) | (SEQ ID | 6002) | 6017) |
| | NO: 6014) | | 6015) | | NO: 6016) | | |
| 9G1-HC_2 | QIQLQESG | TGGYHW | WIRQHP | YIYSSGS | LVTISRDT | GNWHYF | WGQGTM |
| | PGLVKPSQ | N (SEQ | GKGLEW | TSYNPSL | SKNQFSLK | DF | VTVSS |
| | TLSLTCTV | ID NO: | IG | KS (SEQ | LSSVTAAD | (SEQ | (SEQ |
| | SGFSIN | 6000) | (SEQ | ID NO: | TAVYYCAR | ID NO: | ID NO: |
| | (SEQ ID | | ID NO: | 6001) | (SEQ ID | 6002) | 6021) |
| | NO: 6018) | | 6019) | | NO: 6020) | | |
| 9G1-HC_3 | EIQLLESG | TGGYHW | WVRQAP | YIYSSGS | RFTISRDT | GNWHYF | WGQGTM |
| | GGLVQPGG | N (SEQ | GKGLEW | TSYNPSL | SKNTFYLQ | DF | VTVSS |
| | SLRLSCAV | ID NO: | VG | KS (SEQ | MNSLRAED | (SEQ | (SEQ |
| | SGFSIN | 6000) | (SEQ | ID NO: | TAVYYCAR | ID NO: | ID NO: |
| | (SEQ ID | | ID NO: | 6001) | (SEQ ID | 6002) | 6025) |
| | NO: 6022) | | 6023) | | NO: 6024) | | |
| 9G1-HC_4 | QIQLVQSG | TGGYHW | WVRQAP | YIYSSGS | RVTITRDT | GNWHYF | WGQGTM |
| | AEVKKPGS | N (SEQ | GQGLEW | TSYNPSL | STNTFYME | DF | VTVSS |
| | SVKVSCKV | ID NO: | MG | KS (SEQ | LSSLRSED | (SEQ | (SEQ |
| | SGFSIN | 6000) | (SEQ | ID NO: | TAVYYCAR | ID NO: | ID NO: |
| | (SEQ ID | | ID NO: | 6001) | (SEQ ID | 6002) | 6029) |
| | NO: 6026) | | 6027) | | NO: 6028) | | |
| 9G1-HC_5 | EIQLVESG | TGGYHW | WVRQAP | YIYSSGS | RFTISRDT | GNWHYF | WGQGTM |
| | GGLVQPGG | N (SEQ | GKGLEW | TSYNPSL | AKNSFYLQ | DF | VTVSS |
| | SLRLSCAV | ID NO: | VG | KS (SEQ | MNSLRAED | (SEQ | (SEQ |
| | SGFSIN | 6000) | (SEQ | ID NO: | TAVYYCAR | ID NO: | ID NO: |
| | (SEQ ID | | ID NO: | 6001) | (SEQ ID | 6002) | 6034) |
| | NO: 6030) | | 6032) | | NO: 6033) | | |
| 9G1-HC_6 | QIQLVQSG | TGGYHW | WVRQAP | YIYSSGS | RVTMTRDT | GNWHYF | WGQGTM |
| | AEVKKPGA | N (SEQ | GQGLEW | TSYNPSL | STNTFYME | DF | VTVSS |
| | SVKVSCKV | ID NO: | MG | KS (SEQ | LSSLRSED | (SEQ | (SEQ |
| | SGFSIN | 6000) | (SEQ | ID NO: | TAVYYCAR | ID NO: | ID NO: |
| | (SEQ ID | | ID NO: | 6001) | (SEQ ID | 6002) | 6038) |
| | NO: 6035) | | 6036) | | NO: 6037) | | |
| 15H6-HC_1 | QIQLQESG | TGGYHW | WIRQHP | YIYSSGT | LVTISRDT | GNWHYF | WGQGTL |
| | PGLVKPSQ | N (SEQ | GKGLEW | TRYNPSL | SKNQFSLK | DY | VTVSS |
| | TLSLTCTV | ID NO: | IG | KS (SEQ | LSSVTAAD | (SEQ | (SEQ |
| | SGFSIN | 6007) | (SEQ | ID NO: | TAVYYCAR | ID NO: | ID NO: |
| | (SEQ ID | | ID NO: | 6008) | (SEQ ID | 6009) | 6042) |
| | NO: 6039) | | 6040) | | NO: 6041) | | |
| 15H6-HC_2 | QIQLQESG | TGGYHW | WIRQPA | YIYSSGT | RVTMSRDT | GNWHYF | WGQGTL |
| | PGLVKPSE | N (SEQ | GKGLEW | TRYNPSL | SKNQFSLK | DY | VTVSS |
| | TLSLTCTV | ID NO: | IG | KS (SEQ | LSSVTAAD | (SEQ | (SEQ |
| | SGFSIN | 6007) | (SEQ | ID NO: | TAVYYCAR | ID NO: | ID NO: |
| | (SEQ ID | | ID NO: | 6008) | (SEQ ID | 6009) | 6046) |
| | NO: 6043) | | 6044) | | NO: 6045) | | |
| 15H6-HC_3 | EIQLLESG | TGGYHW | WVRQAP | YIYSSGT | RFTISRDT | GNWHYF | WGQGTL |
| | GGLVQPGG | N (SEQ | GKGLEW | TRYNPSL | SKNTFYLQ | DY | VTVSS |
| | SLRLSCAV | ID NO: | VG | KS (SEQ | MNSLRAED | (SEQ | (SEQ |
| | SGFSIN | 6007) | (SEQ | ID NO: | TAVYYCAR | ID NO: | ID NO: |
| | (SEQ ID | | ID NO: | 6008) | (SEQ ID | 6009) | 6050) |
| | NO: 6047) | | 6048) | | NO: 6049) | | |
| 15H6-HC_4 | QIQLVESG | TGGYHW | WIRQAP | YIYSSGT | RFTISRDT | GNWHYF | WGQGTL |
| | GGLVKPGG | N (SEQ | GKGLEW | TRYNPSL | AKNSFYLQ | DY | VTVSS |
| | SLRLSCAV | ID NO: | VG | KS (SEQ | MNSLRAED | (SEQ | (SEQ |
| | SGFSIN | 6007) | (SEQ | ID NO: | TAVYYCAR | ID NO: | ID NO: |
| | (SEQ ID | | ID NO: | 6008) | (SEQ ID | 6009) | 6054) |
| | NO: 6051) | | 6052) | | NO: 6053) | | |
| 15H6-HC_5 | QIQLVQSG | TGGYHW | WVRQAP | YIYSSGT | RVTMTRDT | GNWHYF | WGQGTL |
| | AEVKKPGA | N (SEQ | GQGLEW | TRYNPSL | STNTFYME | DY | VTVSS |
| | SVKVSCKV | ID NO: | MG | KS (SEQ | LSSLRSED | (SEQ | (SEQ |
| | SGFSIN | 6007) | (SEQ | ID NO: | TAVYYCAR | ID NO: | ID NO: |
| | (SEQ ID | | ID NO: | 6008) | (SEQ ID | 6009) | 6058) |
| | NO: 6055) | | 6056) | | NO: 6057) | | |
| 15H6-HC_6 | EIQLVQSG | TGGYHW | WVQQAP | YIYSSGT | RVTITRDT | GNWHYF | WGQGTL |
| | AEVKKPGA | N (SEQ | GKGLEW | TRYNPSL | STNTFYME | DY | VTVSS |
| | TVKISCKV | ID NO: | MG | KS (SEQ | LSSLRSED | (SEQ | (SEQ |
| | SGFSIN | 6007) | (SEQ | ID NO: | TAVYYCAR | ID NO: | ID NO: |
| | (SEQ ID | | ID NO: | 6008) | (SEQ ID | 6009) | 6062) |
| | NO: 6059) | | 6060) | | NO: 6061) | | |

TABLE 18
Exemplary heavy chain CDRs and FWRs
of NKp30-targeting antigen binding domains
(according to the Kabat numbering scheme)

| Ab ID | VHFWR1 | VHCDR1 | VHFWR2 | VHCDR2 | VHFWR3 | VHCDR3 | VHFWR4 |
|---|---|---|---|---|---|---|---|
| 9G1-HC | QIQLQES | GYHWN | WIRQFP | YIYSSGS | RISITRDT | GNWHY | WGQGTM |
| | GPGLVKP | (SEQ | GKKLEW | TSYNPSL | SKNQFFLQ | FDF | VTVSS |
| | SQSLSLT | ID NO: | MG | KS (SEQ | LNSVTTED | (SEQ | (SEQ |
| | CSVTGFS | 7313) | (SEQ | ID NO: | TATYYCAR | ID NO: | ID NO: |
| | INTG | | ID NO: | 6001) | (SEQ | 6002) | 6006) |
| | (SEQ | | 6004) | | ID NO: | | |
| | ID NO: | | | | 6005) | | |
| | 7317) | | | | | | |
| 15H6-HC | QIQLQES | GYHWN | WIRQFP | YIYSSGT | RISITRDT | GNWHY | WGQGTL |
| | GPGLVKP | (SEQ | GKKLEW | TRYNPSL | SKNQFFLQ | FDY | VAVSS |
| | SQSLSLT | ID NO: | MG | KS (SEQ | LNSVTPED | (SEQ | (SEQ |
| | CSVTGFS | 7313) | (SEQ | ID NO: | TATYYCTR | ID NO: | ID NO: |
| | INTG | | ID NO: | 6008) | (SEQ | 6009) | 6013) |
| | (SEQ | | 6011) | | ID NO: | | |
| | ID NO: | | | | 6012) | | |
| | 7317) | | | | | | |
| 9G1-HC_1 | QIQLQES | GYHWN | WIRQPA | YIYSSGS | RVTMSRDT | GNWHY | WGQGTM |
| | GPGLVKP | (SEQ | GKGLEW | TSYNPSL | SKNQFSLK | FDF | VTVSS |
| | SETLSLT | ID NO: | IG | KS (SEQ | LSSVTAAD | (SEQ | (SEQ |
| | CTVSGFS | 7313) | (SEQ | ID NO: | TAVYYCAR | ID NO: | ID NO: |
| | INTG | | ID NO: | 6001) | (SEQ | 6002) | 6017) |
| | (SEQ | | 6015) | | ID NO: | | |
| | ID NO: | | | | 6016) | | |
| | 7371) | | | | | | |
| 9G1-HC_2 | QIQLQES | GYHWN | WIRQHP | YIYSSGS | LVTISRDT | GNWHY | WGQGTM |
| | GPGLVKP | (SEQ | GKGLEW | TSYNPSL | SKNQFSLK | FDF | VTVSS |
| | SQTLSLT | ID NO: | IG | KS (SEQ | LSSVTAAD | (SEQ | (SEQ |
| | CTVSGFS | 7313) | (SEQ | ID NO: | TAVYYCAR | ID NO: | ID NO: |
| | INTG | | ID NO: | 6001) | (SEQ | 6002) | 6021) |
| | (SEQ | | 6019) | | ID NO: | | |
| | ID NO: | | | | 6020) | | |
| | 7372) | | | | | | |
| 9G1-HC_3 | EIQLLES | GYHWN | WVRQAP | YIYSSGS | RFTISRDT | GNWHY | WGQGTM |
| | GGGLVQP | (SEQ | GKGLEW | TSYNPSL | SKNTFYLQ | FDF | VTVSS |
| | GGSLRLS | ID NO: | VG | KS (SEQ | MNSLRAED | (SEQ | (SEQ |
| | CAVSGFS | 7313) | (SEQ | ID NO: | TAVYYCAR | ID NO: | ID NO: |
| | INTG | | ID NO: | 6001) | (SEQ | 6002) | 6025) |
| | (SEQ | | 6023) | | ID NO: | | |
| | ID NO: | | | | 6024) | | |
| | 7373) | | | | | | |
| 9G1-HC_4 | QIQLVQS | GYHWN | WVRQAP | YIYSSGS | RVTITRDT | GNWHY | WGQGTM |
| | GAEVKKP | (SEQ | GQGLEW | TSYNPSL | STNTFYME | FDF | VTVSS |
| | GSSVKVS | ID NO: | MG | KS (SEQ | LSSLRSED | (SEQ | (SEQ |
| | CKVSGFS | 7313) | (SEQ | ID NO: | TAVYYCAR | ID NO: | ID NO: |
| | INTG | | ID NO: | 6001) | (SEQ | 6002) | 6029) |
| | (SEQ | | 6027) | | ID NO: | | |
| | ID NO: | | | | 6028) | | |
| | 7374) | | | | | | |
| 9G1-HC_5 | EIQLVES | GYHWN | WVRQAP | YIYSSGS | RFTISRDT | GNWHY | WGQGTM |
| | GGGLVQP | (SEQ | GKGLEW | TSYNPSL | AKNSFYLQ | FDF | VTVSS |
| | GGSLRLS | ID NO: | VG | KS (SEQ | MNSLRAED | (SEQ | (SEQ |
| | CAVSGFS | 7313) | (SEQ | ID NO: | TAVYYCAR | ID NO: | ID NO: |
| | INTG | | ID NO: | 6001) | (SEQ | 6002) | 6034) |
| | (SEQ | | 6032) | | ID NO: | | |
| | ID NO: | | | | 6033) | | |
| | 7375) | | | | | | |
| 9G1-HC_6 | QIQLVQS | GYHWN | WVRQAP | YIYSSGS | RVTMTRDT | GNWHY | WGQGTM |
| | GAEVKKP | (SEQ | GQGLEW | TSYNPSL | STNTFYME | FDF | VTVSS |
| | GASVKVS | ID NO: | MG | KS (SEQ | LSSLRSED | (SEQ | (SEQ |
| | CKVSGFS | 7313) | (SEQ | ID NO: | TAVYYCAR | ID NO: | ID NO: |
| | INTG | | ID NO: | 6001) | (SEQ | 6002) | 6038) |
| | (SEQ | | 6036) | | ID NO: | | |
| | ID NO: | | | | 6037) | | |
| | 7376) | | | | | | |
| 15H6-HC_1 | QIQLQES | GYHWN | WIRQHP | YIYSSGT | LVTISRDT | GNWHY | WGQGTL |
| | GPGLVKP | (SEQ | GKGLEW | TRYNPSL | SKNQFSLK | FDY | VTVSS |
| | SQTLSLT | ID NO: | IG | KS (SEQ | LSSVTAAD | (SEQ | (SEQ |
| | CTVSGFS | 7313) | (SEQ | ID NO: | TAVYYCAR | ID NO: | ID NO: |
| | INTG | | ID NO: | 6008) | (SEQ | 6009) | 6042) |
| | (SEQ | | 6040) | | ID NO: | | |
| | ID NO: | | | | 6041) | | |
| | 7372) | | | | | | |
| 15H6-HC_2 | QIQLQES | GYHWN | WIRQPA | YIYSSGT | RVTMSRDT | GNWHY | WGQGTL |
| | GPGLVKP | (SEQ | GKGLEW | TRYNPSL | SKNQFSLK | FDY | VTVSS |
| | SETLSLT | ID NO: | IG | KS (SEQ | LSSVTAAD | (SEQ | (SEQ |
| | CTVSGFS | 7313) | (SEQ | ID NO: | TAVYYCAR | ID NO: | ID NO: |
| | INTG | | ID NO: | 6008) | (SEQ | 6009) | 6046) |
| | (SEQ | | 6044) | | ID NO: | | |
| | ID NO: | | | | 6045) | | |
| | 7371) | | | | | | |
| 15H6-HC_3 | EIQLLES | GYHWN | WVRQAP | YIYSSGT | RFTISRDT | GNWHY | WGQGTL |
| | GGGLVQP | (SEQ | GKGLEW | TRYNPSL | SKNTFYLQ | FDY | VTVSS |
| | GGSLRLS | ID NO: | VG | KS (SEQ | MNSLRAED | (SEQ | (SEQ |
| | CAVSGFS | 7313) | (SEQ | ID NO: | TAVYYCAR | ID NO: | ID NO: |
| | INTG | | ID NO: | 6008) | (SEQ | 6009) | 6050) |
| | (SEQ | | 6048) | | ID NO: | | |
| | ID NO: | | | | 6049) | | |
| | 7373) | | | | | | |
| 15H6-HC_4 | QIQLVES | GYHWN | WIRQAP | YIYSSGT | RFTISRDT | GNWHY | WGQGTL |
| | GGGLVKP | (SEQ | GKGLEW | TRYNPSL | AKNSFYLQ | FDY | VTVSS |
| | GGSLRLS | ID NO: | VG | KS (SEQ | MNSLRAED | (SEQ | (SEQ |
| | CAVSGFS | 7313) | (SEQ | ID NO: | TAVYYCAR | ID NO: | ID NO: |
| | INTG | | ID NO: | 6008) | (SEQ | 6009) | 6054) |
| | (SEQ | | 6052) | | ID NO: | | |
| | ID NO: | | | | 6053) | | |
| | 7377) | | | | | | |
| 15H6-HC_5 | QIQLVQS | GYHWN | WVRQAP | YIYSSGT | RVTMTRDT | GNWHY | WGQGTL |
| | GAEVKKP | (SEQ | GQGLEW | TRYNPS | STNTFYME | FDY | VTVSS |
| | GASVKVS | ID NO: | MG | LKS | LSSLRSED | (SEQ | (SEQ |
| | CKVSGFS | 7313) | (SEQ | (SEQ ID | TAVYYCAR | ID NO: | ID NO: |
| | INTG | | ID NO: | NO: | (SEQ | 6009) | 6058) |
| | (SEQ | | 6056) | 6008) | ID NO: | | |
| | ID NO: | | | | 6057) | | |
| | 7376) | | | | | | |
| 15H6-HC_6 | EIQLVQS | GYHWN | WVQQAP | YIYSSGT | RVTITRDT | GNWHY | WGQGTL |
| | GAEVKKP | (SEQ | GKGLEW | TRYNPSL | STNTFYME | FDY | VTVSS |
| | GATVKIS | ID NO: | MG | KS (SEQ | LSSLRSED | (SEQ | (SEQ |
| | CKVSGFS | 7313) | (SEQ | ID NO: | TAVYYCAR | ID NO: | ID NO: |
| | INTG | | ID NO: | 6008) | (SEQ | 6009) | 6062) |
| | (SEQ | | 6060) | | ID NO: | | |
| | ID NO: | | | | 6061) | | |
| | 7378) | | | | | | |
| 9D9-HC | QIQLQES | GYHWN | WIRQFP | YIYSSGT | RISITRDT | GDWHY | WGQGTM |
| | GPGLVKP | (SEQ | GKKVEW | TKYNPSL | SKNQFFLQ | FDY | VAVSS |
| | SQSLSLS | ID NO: | MG | KS (SEQ | LNSVTTED | (SEQ | (SEQ |
| | CSVTGFS | 7313) | (SEQ | ID NO: | TATYYCAR | ID NO: | ID NO: |
| | INTG | | ID NO: | 7385) | (SEQ | 7315) | 7316) |
| | (SEQ | | 7314) | | ID NO: | | |
| | ID NO: | | | | 6005) | | |
| | 7312) | | | | | | |
| 3A12-HC | QIQLQES | GYHWN | WIRQFP | YIYSSGS | RFSITRDT | GNWHY | WGQGTL |
| | GPGLVKP | (SEQ | GKKLEW | TRYNPSL | SKNQFFLQ | FDY | VAVSS |
| | SQSLSLT | ID NO: | MG | KS (SEQ | LNSVTTED | (SEQ | (SEQ |
| | CSVTGFS | 7313) | (SEQ | ID NO: | TATYYCTR | ID NO: | ID NO: |
| | INTG | | ID NO: | 7318) | (SEQ | 6009) | 6013) |
| | (SEQ | | 6004) | | ID NO: | | |
| | ID NO: | | | | 7319) | | |
| | 7317) | | | | | | |
| 12D10-HC | QIQLQES | GYHWN | WIRQFP | YIYSSGT | RISITRDT | GNWHY | WGQGTL |
| | GPGLVKP | (SEQ | GKKLEW | TRYNPSL | SKNQFFLQ | FDY | VAVSS |
| | SQSLSLT | ID NO: | MG | KS (SEQ | LNSVTPED | (SEQ | (SEQ |
| | CSVTGFS | 7313) | (SEQ | ID NO: | TATYYCTR | ID NO: | ID NO: |
| | INTG | | ID NO: | 6008) | (SEQ | 6009) | 6013) |
| | (SEQ | | 6004) | | ID NO: | | |
| | ID NO: | | | | 6012) | | |
| | 7317) | | | | | | |
| 15E1-HC | QIQLQES | GYHWN | WIRQFP | YIYSSGS | RFSITRDT | GDWHY | WGPGTM |
| | GPGLVKP | (SEQ | GKKLEW | TSYNPSL | SKNQFFLQ | FDY | VTVSS |
| | SQSLSLS | ID NO: | MG | KS (SEQ | LNSVTTED | (SEQ | (SEQ |
| | CSVTGFS | 7313) | (SEQ | ID NO: | TATYYCAR | ID NO: | ID NO: |
| | ITTT | | ID NO: | 6001) | (SEQ | 7315) | 7324) |
| | (SEQ | | 6004) | | ID NO: | | |
| | ID NO: | | | | 7323) | | |
| | 7322) | | | | | | |
| 15E1_Humanized | QIQLQES | GYHWN | WIRQHP | YIYSSGS | LVTISRDT | GDWHY | WGQGTM |
| variant_VH1 | GPGLVKP | (SEQ | GKGLEW | TSYNPSL | SKNQFSLK | FDY | VTVSS |
| | SQTLSLT | ID NO: | IG | KS (SEQ | LSSVTAAD | (SEQ | (SEQ |
| | CTVSGFS | 7313) | (SEQ | ID NO: | TAVYYCAR | ID NO: | ID NO: |
| | ITTT | | ID NO: | 6001) | (SEQ | 7315) | 6006) |
| | (SEQ | | 6019) | | ID NO: | | |
| | ID NO: | | | | 6020) | | |
| | 7330) | | | | | | |
| 15E1_Humanized | QIQLVES | GYHWN | WIRQAP | YIYSSGS | RFTISRDT | GDWHY | WGQGTM |
| variant_VH2 | GGGLVKP | (SEQ | GKGLEW | TSYNPSL | AKNSFYLQ | FDY | VTVSS |
| | GGSLRLS | ID NO: | VG | KS (SEQ | MNSLRAED | (SEQ | (SEQ |
| | CAVSGFS | 7313) | (SEQ | ID NO: | TAVYYCAR | ID NO: | ID NO: |
| | ITTT | | ID NO: | 6001) | (SEQ | 7315) | 6006) |
| | (SEQ | | 6052) | | ID NO: | | |
| | ID NO: | | | | 6033) | | |
| | 7331) | | | | | | |
| 15E1_Humanized | EIQLLES | GYHWN | WVRQAP | YIYSSGS | RFTISRDT | GDWHY | WGQGTM |
| variant_VH3 | GGGLVQP | (SEQ | GKGLEW | TSYNPSL | SKNTFYLQ | FDY | VTVSS |
| | GGSLRLS | ID NO: | VG | KS (SEQ | MNSLRAED | (SEQ | (SEQ |
| | CAVSGFS | 7313) | (SEQ | ID NO: | TAVYYCAR | ID NO: | ID NO: |
| | ITTT | | ID NO: | 6001) | (SEQ | 7315) | 6006) |
| | (SEQ | | 6023) | | ID NO: | | |
| | ID NO: | | | | 6024) | | |
| | 7332) | | | | | | |
| 15E1_Humanized | EIQLVES | GYHWN | WVRQAP | YIYSSGS | RFTISRDT | GDWHY | WGQGTM |
| variant_VH4 | GGGLVQP | (SEQ | GKGLEW | TSYNPSL | AKNSFYLQ | FDY | VTVSS |
| | GGSLRLS | ID NO: | VG | KS (SEQ | MNSLRAED | (SEQ | (SEQ |
| | CAVSGFS | 7313) | (SEQ | ID NO: | TAVYYCAR | ID NO: | ID NO: |
| | ITTT | | ID NO: | 6001) | (SEQ | 7315) | 6006) |
| | (SEQ | | 6023) | | ID NO: | | |
| | ID NO: | | | | 6033) | | |
| | 7333) | | | | | | |
| 15E1_Humanized | QIQLVQS | GYHWN | WVRQAP | YIYSSGS | RVTMTRDT | GDWHY | WGQGTM |
| variant_VH5 | GAEVKKP | (SEQ | GQGLEW | TSYNPSL | STNTFYME | FDY | VTVSS |
| | GASVKVS | ID NO: | MG | KS (SEQ | LSSLRSED | (SEQ | (SEQ |
| | CKVSGFS | 7313) | (SEQ | ID NO: | TAVYYCAR | ID NO: | ID NO: |
| | ITTT | | ID NO: | 6001) | (SEQ | 7315) | 6006) |
| | (SEQ | | 6027) | | ID NO: | | |
| | ID NO: | | | | 6037) | | |
| | 7334) | | | | | | |

TABLE 8
Exemplary light chain CDRs and FWRs of
NKp30-targeting antigen binding domains

| Ab ID | VLFWR1 | VLCDR1 | VLFWR2 | VLCDR2 | VLFWR3 | VLCDR3 | VLFWR4 |
|---|---|---|---|---|---|---|---|
| 9G1-LC | SYTLTQ | SGERLS | WYQQKP | ENDKRP | GIPDQFSG | QSWDST | FGSGTQ |
| | PPLLSV | DKYVH | GRAPVM | S (SEQ | SNSGNIAT | NSAV | LTVL |
| | ALGHKA | (SEQ | VIY | ID NO: | LTISKAQA | (SEQ | (SEQ |
| | TITC | ID NO: | (SEQ | 6064) | GYEADYYC | ID NO: | ID NO: |
| | (SEQ | 6063) | ID NO: | | (SEQ ID | 7293) | 6069) |
| | ID NO: | | 6067) | | NO: 7292) | | |
| | 6066) | | | | | | |
| 15H6-LC | SYTLTQ | SGENLS | WYQQKP | ENEKRP | GIPDQFSG | HYWESI | FGSGTH |
| | PPSLSV | DKYVH | GRAPVM | S (SEQ | SNSGNIAT | NSVV | LTVL |
| | APGQKA | (SEQ | VIY | ID NO: | LTISKAQP | (SEQ | (SEQ |
| | TIIC | ID NO: | (SEQ | 6071) | GSEADYYC | ID NO: | ID NO: |
| | (SEQ | 6070) | ID NO: | | (SEQ ID | 6072) | 6076) |
| | ID NO: | | 6074) | | NO: 6075) | | |
| | 6073) | | | | | | |
| 9G1-LC_1 | QSVTTQ | SGERLS | WYQQLP | ENDKRP | GVPDRFSG | QSWDST | FGGGTQ |
| | PPSVSG | DKYVH | GTAPKM | S (SEQ | SNSGNSAS | NSAV | LTVL |
| | APGQRV | (SEQ | LIY | ID NO: | LAITGLQA | (SEQ | (SEQ |
| | TISC | ID NO: | (SEQ | 6064) | EDEADYYC | ID NO: | ID NO: |
| | (SEQ | 6063) | ID NO: | | (SEQ ID | 7293) | 6080) |
| | ID NO: | | 6078) | | NO: 6079) | | |
| | 6077) | | | | | | |
| 9G1-LC_2 | QSVTTQ | SGERLS | WYQQLP | ENDKRP | GVPDRFSG | QSWDST | FGGGTQ |
| | PPSASG | DKYVH | GTAPKM | S (SEQ | SNSGNSAS | NSAV | LTVL |
| | TPGQRV | (SEQ | LIY | ID NO: | LAISGLQS | (SEQ | (SEQ |
| | TISC | ID NO: | (SEQ | 6064) | EDEADYYC | ID NO: | ID NO: |
| | (SEQ | 6063) | ID NO: | | (SEQ ID | 7293) | 6084) |
| | ID NO: | | 6082) | | NO: 6083) | | |
| | 6081) | | | | | | |
| 9G1-LC_3 | QSVTTQ | SGERLS | WYQQLP | ENDKRP | GVPDRFSG | QSWDST | FGGGTQ |
| | PPSASG | DKYVH | GTAPKM | S (SEQ | SNSGNSAS | NSAV | LTVL |
| | TPGQRV | (SEQ | LIY | ID NO: | LAISGLRS | (SEQ | (SEQ |
| | TISC | ID NO: | (SEQ | 6064) | EDEADYYC | ID NO: | ID NO: |
| | (SEQ | 6063) | ID NO: | | (SEQ ID | 7293) | 6088) |
| | ID NO: | | 6086) | | NO: 6087) | | |
| | 6085) | | | | | | |
| 9G1-LC_4 | SSETTQ | SGERLS | WYQQKP | ENDKRP | GIPERFSG | QSWDST | FGGGTQ |
| | PHSVSV | DKYVH | GQDPVM | S (SEQ | SNPGNTAT | NSAV | LTVL |
| | ATAQMA | (SEQ | VIY | ID NO: | LTISRIEA | (SEQ | (SEQ |
| | RITC | ID NO: | (SEQ | 6064) | GDEADYYC | ID NO: | ID NO: |
| | (SEQ | 6063) | ID NO: | | (SEQ ID | 7293) | 6092) |
| | ID NO: | | 6090) | | NO: 6091) | | |
| | 6089) | | | | | | |
| 9G1-LC_5 | DIQMTQ | SGERLS | WYQQKP | ENDKRP | GVPSRFSG | QSWDST | FGQGTK |
| | SPSTLS | DKYVH | GKAPKM | S (SEQ | SNSGNEAT | NSAV | VEIK |
| | ASVGDR | (SEQ | LIY | ID NO: | LTISSLQP | (SEQ | (SEQ |
| | VTITC | ID NO: | (SEQ | 6064) | DDFATYYC | ID NO: | ID NO: |
| | (SEQ | 6063) | ID NO: | | (SEQ ID | 7293) | 6096) |
| | ID NO: | | 6094) | | NO: 6095) | | |
| | 6093) | | | | | | |
| 15H6-LC_1 | QYVLTQ | SGENLS | WYQQLP | ENEKRP | GVPDRFSG | HYWESI | FGEGTE |
| | PPSASG | DKYVH | GTAPKM | S (SEQ | SNSGNSAS | NSVV | LTVL |
| | TPGQRV | (SEQ | LIY | ID NO: | LAISGLQS | (SEQ | (SEQ |
| | TISC | ID NO: | (SEQ | 6071) | EDEADYYC | ID NO: | ID NO: |
| | (SEQ | 6070) | ID NO: | | (SEQ ID | 6072) | 6100) |
| | ID NO: | | 6098) | | NO: 6099) | | |
| | 6097) | | | | | | |
| 15H6-LC_2 | QYVLTQ | SGENLS | WYQQLP | ENEKRP | GVPDRFSG | HYWESI | FGEGTE |
| | PPSASG | DKYVH | GTAPKM | S (SEQ | SNSGNSAS | NSVV | LTVL |
| | TPGQRV | (SEQ | LIY | ID NO: | LAISGLRS | (SEQ | (SEQ |
| | TISC | ID NO: | (SEQ | 6071) | EDEADYYC | ID NO: | ID NO: |
| | (SEQ | 6070) | ID NO: | | (SEQ ID | 6072) | 6104) |
| | ID NO: | | 6102) | | NO: 6103) | | |
| | 6101) | | | | | | |
| 15H6-LC_3 | SYELTQ | SGENLS | WYQQKP | ENEKRP | GIPERFSG | HYWESI | FGEGTE |
| | PPSVSV | DKYVH | GQSPVM | S (SEQ | SNSGNTAT | NSVV | LTVL |
| | SPGQTA | (SEQ | VIY | ID NO: | LTISGTQA | (SEQ | (SEQ |
| | SITC | ID NO: | (SEQ | 6071) | MDEADYYC | ID NO: | ID NO: |
| | (SEQ | 6070) | ID NO: | | (SEQ ID | 6072) | 6108) |
| | ID NO: | | 6106) | | NO: 6107) | | |
| | 6105) | | | | | | |
| 15H6-LC_4 | DYVLTQ | SGENLS | WYLQKP | ENEKRP | GVPDRFSG | HYWESI | FGQGTK |
| | SPLSLP | DKYVH | GQSPQM | S (SEQ | SNSGNDAT | NSVV | VEIK |
| | VTPGEP | (SEQ | LIY | ID NO: | LKISRVEA | (SEQ | (SEQ |
| | ASISC | ID NO: | (SEQ | 6071) | EDVGVYYC | ID NO: | ID NO: |
| | (SEQ | 6070) | ID NO: | | (SEQ ID | 6072) | 6112) |
| | ID NO: | | 6110) | | NO: 6111) | | |
| | 6109) | | | | | | |
| 15H6-LC_5 | AYQLTQ | SGENLS | WYQQKP | ENEKRP | GVPSRFSG | HYWESI | FGQGTK |
| | SPSSLS | DKYVH | GKAPKM | S (SEQ | SNSGNDAT | NSVV | VEIK |
| | ASVGDR | (SEQ | LIY | ID NO: | LTISSLQP | (SEQ | (SEQ |
| | VTITC | ID NO: | (SEQ | 6071) | EDFATYYC | ID NO: | ID NO: |
| | (SEQ | 6070) | ID NO: | | (SEQ ID | 6072) | 6116) |
| | ID NO: | | 6114) | | NO: 6115) | | |
| | 6113) | | | | | | |
| 15H6-LC_6 | EYVLTQ | SGENLS | WYQQKP | ENEKRP | GIPARFSG | HYWESI | FGQGTK |
| | SPATLS | DKYVH | GQAPRM | S (SEQ | SNSGNEAT | NSVV | VEIK |
| | VSPGER | (SEQ | LIY | ID NO: | LTISSLQS | (SEQ | (SEQ |
| | ATLSC | ID NO: | (SEQ | 6071) | EDFAVYYC | ID NO: | ID NO: |
| | (SEQ | 6070) | ID NO: | | (SEQ ID | 6072) | 6120) |
| | ID NO: | | 6118) | | NO: 6119) | | |
| | 6117) | | | | | | |
| 9D9-LC | SYTLTQ | SGENLS | WYQQKP | ENDKRP | GIPDQFSG | HCWDST | FGSGTH |
| | PPLVSV | DKYVH | GRAPVM | S (SEQ | SNSGNIAT | NSAV | LTVL |
| | ALGQKA | (SEQ | VIY | ID NO: | LTISKAQA | (SEQ | (SEQ |
| | TIIC | ID NO: | (SEQ | 6064) | GYEADYYC | ID NO: | ID NO: |
| | (SEQ | 6070) | ID NO: | | (SEQ ID | 7321) | 6076) |
| | ID NO: | | 6067) | | NO: 7292) | | |
| | 7320) | | | | | | |
| 3A12-LC | SYTLTQ | SGENLS | WYQQKP | ENDKRP | GIPDQFSG | HCWDST | FGSGTH |
| | PPLVSV | DKYVH | GRAPVM | S (SEQ | SNSGNIAT | NSAV | LTVL |
| | ALGQKA | (SEQ | VIY | ID NO: | LTISKAQA | (SEQ | (SEQ |
| | TIIC | ID NO: | (SEQ | 6064) | GYEADYYC | ID NO: | ID NO: |
| | (SEQ | 6070) | ID NO: | | (SEQ ID | 7321) | 6076) |
| | ID NO: | | 6067) | | NO: 7292) | | |
| | 7320) | | | | | | |
| 12D10-LC | SYTLTQ | SGENLS | WYQQKP | ENEKRP | GIPDQFSG | HYWESI | FGSGTH |
| | PPSLSV | DKYVH | GRAPVM | S (SEQ | SNSGNIAT | NSVV | LTVL |
| | APGQKA | (SEQ | VIY | ID NO: | LTISKAQP | (SEQ | (SEQ |
| | TIIC | ID NO: | (SEQ | 6071) | GSEADYYC | ID NO: | ID NO: |
| | (SEQ | 6070) | ID NO: | | (SEQ ID | 6072) | 6076) |
| | ID NO: | | 6074) | | NO: 6075) | | |
| | 6073) | | | | | | |
| 15E1-LC | SFTLTQ | SGEKLS | WYQQKP | ENDRRP | GIPDQFSG | QFWDST | FGGGTQ |
| | PPLVSV | DKYVH | GRAPVM | S (SEQ | SNSGNIAS | NSAV | LTVL |
| | AVGQVA | (SEQ | VIY | ID NO: | LTISKAQA | (SEQ | (SEQ |
| | TITC | ID NO: | (SEQ | 7327) | GDEADYFC | ID NO: | ID NO: |
| | (SEQ | 7326) | ID NO: | | (SEQ ID | 7329) | 6080) |
| | ID NO: | | 6067) | | NO: 7328) | | |
| | 7325) | | | | | | |
| 15E1_Humanized | SSETTQ | SGEKLS | WYQQKP | ENDRRP | GIPERFSG | QFWDST | FGGGTQ |
| variant_VL1 | PPSVSV | DKYVH | GQSPVM | S (SEQ | SNSGNTAT | NSAV | LTVL |
| | SPGQTA | (SEQ | VIY | ID NO: | LTISGTQA | (SEQ | (SEQ |
| | SITC | ID NO: | (SEQ | 7327) | MDEADYFC | ID NO: | ID NO: |
| | (SEQ | 7326) | ID NO: | | (SEQ ID | 7329) | 6080) |
| | ID NO: | | 6106) | | NO: 7336) | | |
| | 7335) | | | | | | |
| 15E1_Humanized | SSETTQ | SGEKLS | WYQQKP | ENDRRP | GIPERFSG | QFWDST | FGGGTQ |
| variant_VL2 | PHSVSV | DKYVH | GQDPVM | S (SEQ | SNPGNTAT | NSAV | LTVL |
| | ATAQMA | (SEQ | VIY | ID NO: | LTISRIEA | (SEQ | (SEQ |
| | RITC | ID NO: | (SEQ | 7327) | GDEADYFC | ID NO: | ID NO: |
| | (SEQ | 7326) | ID NO: | | (SEQ ID | 7329) | 6080) |
| | ID NO: | | 6090) | | NO: 7337) | | |
| | 6089) | | | | | | |
| 15E1_Humanized | QSVTTQ | SGEKLS | WYQQLP | ENDRRP | GVPDRFSG | QFWDST | FGGGTQ |
| variant_VL3 | PPSASG | DKYVH | GTAPKM | S (SEQ | SNSGNSAS | NSAV | LTVL |
| | TPGQRV | (SEQ | LIY | ID NO: | LAISGLRS | (SEQ | (SEQ |
| | TISC | ID NO: | (SEQ | 7327) | EDEADYFC | ID NO: | ID NO: |
| | (SEQ | 7326) | ID NO: | | (SEQ ID | 7329) | 6080) |
| | ID NO: | | 6078) | | NO: 7338) | | |
| | 6081) | | | | | | |
| 15E1_Humanized | QSVTTQ | SGEKLS | WYQQLP | ENDRRP | GVPDRFSG | QFWDST | FGGGTQ |
| variant_VL4 | PPSVSG | DKYVH | GTAPKM | S (SEQ | SNSGNSAS | NSAV | LTVL |
| | APGQRV | (SEQ | LIY | ID NO: | LAITGLQA | (SEQ | (SEQ |
| | TISC | ID NO: | (SEQ | 7327) | EDEADYFC | ID NO: | ID NO: |
| | (SEQ | 7326) | ID NO: | | (SEQ ID | 7329) | 6080) |
| | ID NO: | | 6078) | | NO: 7339) | | |
| | 6077) | | | | | | |
| 15E1_Humanized | DSVTTQ | SGEKLS | WYQQRP | ENDRRP | GVPDRFSG | QFWDST | FGGGTK |
| variant_VL5 | SPLSLP | DKYVH | GQSPRM | S (SEQ | SNSGNDAT | NSAV | VEIK |
| | VTLGQP | (SEQ | LIY | ID NO: | LKISRVEA | (SEQ | (SEQ |
| | ASISC | ID NO: | (SEQ | 7327) | EDVGVYFC | ID NO: | ID NO: |
| | (SEQ | 7326) | ID NO: | | (SEQ ID | 7329) | 233) |
| | ID NO: | | 7341) | | NO: 7342) | | |
| | 7340) | | | | | | |

TABLE 9
Exemplary variable regions of NKp30-targeting
antigen binding domains

| SEQ | | | |
|---|---|---|---|
| ID NO | Ab ID | Description | Sequence |
| SEQ | 9G1-HC | 9G1 heavy | QIQLQESGPGLVKPSQSLSLTCSVTGFSINTGGYHWN |
| ID NO: | | chain variable | WIRQFPGKKLEWMGYIYSSGSTSYNPSLKSRISITRD |
| 6121 | | region | TSKNQFFLQLNSVTTEDTATYYCARGNWHYFDFWGQG |
| | | | TMVTVSS |
| SEQ | 15H6-HC | 15H6 heavy | QIQLQESGPGLVKPSQSLSLTCSVTGFSINTGGYHWN |
| ID NO: | | chain variable | WIRQFPGKKLEWMGYIYSSGTTRYNPSLKSRISITRD |
| 6122 | | region | TSKNQFFLQLNSVTPEDTATYYCTRGNWHYFDYWGQG |
| | | | TLVAVSS |
| SEQ | 9G1-HC_1 | 9G1 heavy | QIQLQESGPGLVKPSETLSLTCTVSGFSINTGGYHWN |
| ID NO: | | chain variable | WIRQPAGKGLEWIGYIYSSGSTSYNPSLKSRVTMSRD |
| 6123 | | region | TSKNQFSLKLSSVTAADTAVYYCARGNWHYFDFWGQG |
| | | humanized | TMVTVSS |
| | | variant 1 | |
| SEQ | 9G1-HC_2 | 9G1 heavy | QIQLQESGPGLVKPSQTLSLTCTVSGFSINTGGYHWN |
| ID NO: | | chain variable | WIRQHPGKGLEWIGYIYSSGSTSYNPSLKSLVTISRD |
| 6124 | | region | TSKNQFSLKLSSVTAADTAVYYCARGNWHYFDFWGQG |
| | | humanized | TMVTVSS |
| | | variant 2 | |
| SEQ | 9G1-HC_3 | 9G1 heavy | EIQLLESGGGLVQPGGSLRLSCAVSGFSINTGGYHWN |
| ID NO: | | chain variable | WVRQAPGKGLEWVGYIYSSGSTSYNPSLKSRFTISRD |
| 6125 | | region | TSKNTFYLQMNSLRAEDTAVYYCARGNWHYFDFWGQG |
| | | humanized | TMVTVSS |
| | | variant 3 | |
| SEQ | 9G1-HC_4 | 9G1 heavy | QIQLVQSGAEVKKPGSSVKVSCKVSGFSINTGGYHWN |
| ID NO: | | chain variable | WVRQAPGQGLEWMGYIYSSGSTSYNPSLKSRVTITRD |
| 6126 | | region | TSTNTFYMELSSLRSEDTAVYYCARGNWHYFDFWGQG |
| | | humanized | TMVTVSS |
| | | variant 4 | |
| SEQ | 9G1-HC_5 | 9G1 heavy | EIQLVESGGGLVQPGGSLRLSCAVSGFSINTGGYHWN |
| ID NO: | | chain variable | WVRQAPGKGLEWVGYIYSSGSTSYNPSLKSRFTISRD |
| 6127 | | region | TAKNSFYLQMNSLRAEDTAVYYCARGNWHYFDFWGQG |
| | | humanized | TMVTVSS |
| | | variant 5 | |
| SEQ | 9G1-HC_6 | 9G1 heavy | QIQLVQSGAEVKKPGASVKVSCKVSGFSINTGGYHWN |
| ID NO: | | chain variable | WVRQAPGQGLEWMGYIYSSGSTSYNPSLKSRVTMTRD |
| 6128 | | region | TSTNTFYMELSSLRSEDTAVYYCARGNWHYFDFWGQG |
| | | humanized | TMVTVSS |
| | | variant 6 | |
| SEQ | 15H6-HC_1 | 15H6 heavy | QIQLQESGPGLVKPSQTLSLTCTVSGFSINTGGYHWN |
| ID NO: | | chain variable | WIRQHPGKGLEWIGYIYSSGTTRYNPSLKSLVTISRD |
| 6129 | | region | TSKNQFSLKLSSVTAADTAVYYCARGNWHYFDYW |
| | | humanized | GQGTLVTVSS |
| | | variant 1 | |
| SEQ | 15H6-HC_2 | 15H6 heavy | QIQLQESGPGLVKPSETLSLTCTVSGFSINTGGYHWN |
| ID NO: | | chain variable | WIRQPAGKGLEWIGYIYSSGTTRYNPSLKSRVTMSRD |
| 6130 | | region | TSKNQFSLKLSSVTAADTAVYYCARGNWHYFDYWGQG |
| | | humanized | TLVTVSS |
| | | variant 2 | |
| SEQ | 15H6-HC_3 | 15H6 heavy | EIQLLESGGGLVQPGGSLRLSCAVSGFSINTGGYHWN |
| ID NO: | | chain variable | WVRQAPGKGLEWVGYIYSSGTTRYNPSLKSRFTISRD |
| 6131 | | region | TSKNTFYLQMNSLRAEDTAVYYCARGNWHYFDYWGQG |
| | | humanized | TLVTVSS |
| | | variant 3 | |
| SEQ | 15H6-HC_4 | 15H6 heavy | QIQLVESGGGLVKPGGSLRLSCAVSGFSINTGGYHWN |
| ID NO: | | chain variable | WIRQAPGKGLEWVGYIYSSGTTRYNPSLKSRFTISRD |
| 6132 | | region | TAKNSFYLQMNSLRAEDTAVYYCARGNWHYFDYWGQG |
| | | humanized | TLVTVSS |
| | | variant 4 | |
| SEQ | 15H6-HC_5 | 15H6 heavy | QIQLVQSGAEVKKPGASVKVSCKVSGFSINTGGYHWN |
| ID NO: | | chain variable | WVRQAPGQGLEWMGYIYSSGTTRYNPSLKSRVTMTRD |
| 6133 | | region | TSTNTFYMELSSLRSEDTAVYYCARGNWHYFDYWGQG |
| | | humanized | TLVTVSS |
| | | variant 5 | |
| SEQ | 15H6-HC_6 | 15H6 heavy | EIQLVQSGAEVKKPGATVKISCKVSGFSINTGGYHWN |
| ID NO: | | chain variable | WVQQAPGKGLEWMGYIYSSGTTRYNPSLKSRVTITRD |
| 6134 | | region | TSTNTFYMELSSLRSEDTAVYYCARGNWHYFDYWGQG |
| | | humanized | TLVTVSS |
| | | variant 6 | |
| SEQ | 9G1-LC | 9G1 light | SYTLTQPPLLSVALGHKATITCSGERLSDKYVHWYQQ |
| ID NO: | | chain variable | KPGRAPVMVIYENDKRPSGIPDQFSGSNSGNIATLTI |
| 7294 | | region | SKAQAGYEADYYCQSWDSTNSAVFGSGTQLTVL |
| SEQ | 15H6-LC | 15H6 light | SYTLTQPPSLSVAPGQKATIICSGENLSDKYVHWYQQ |
| ID NO: | | chain variable | KPGRAPVMVIYENEKRPSGIPDQFSGSNSGNIATLTI |
| 6136 | | region | SKAQPGSEADYYCHYWESINSVVFGSGTHLTVL |
| SEQ | 9G1-LC_1 | 9G1 light | QSVTTQPPSVSGAPGQRVTISCSGERLSDKYVHWYQQ |
| ID NO: | | chain variable | LPGTAPKMLIYENDKRPSGVPDRFSGSNSGNSASLAI |
| 6137 | | region | TGLQAEDEADYYCQSWDSTNSAVFGGGTQLTVL |
| | | humanized | |
| | | variant 1 | |
| SEQ | 9G1-LC_2 | 9G1 light | QSVTTQPPSASGTPGQRVTISCSGERLSDKYVHWYQQ |
| ID NO: | | chain variable | LPGTAPKMLIYENDKRPSGVPDRFSGSNSGNSASLAI |
| 6138 | | region | SGLQSEDEADYYCQSWDSTNSAVFGGGTQLTVL |
| | | humanized | |
| | | variant 2 | |
| SEQ | 9G1-LC_3 | 9G1 light | QSVTTQPPSASGTPGQRVTISCSGERLSDKYVHWYQQ |
| ID NO: | | chain variable | LPGTAPKMLIYENDKRPSGVPDRFSGSNSGNSASLAI |
| 6139 | | region | SGLRSEDEADYYCQSWDSTNSAVFGGGTQLTVL |
| | | humanized | |
| | | variant 3 | |
| SEQ | 9G1-LC_4 | 9G1 light | SSETTQPHSVSVATAQMARITCSGERLSDKYVHWYQQ |
| ID NO: | | chain variable | KPGQDPVMVIYENDKRPSGIPERFSGSNPGNTATLTI |
| 6140 | | region | SRIEAGDEADYYCQSWDSTNSAVFGGGTQLTVL |
| | | humanized | |
| | | variant 4 | |
| SEQ | 9G1-LC_5 | 9G1 light | DIQMTQSPSTLSASVGDRVTITCSGERLSDKYVHWYQ |
| ID NO: | | chain variable | QKPGKAPKMLIYENDKRPSGVPSRFSGSNSGNEATLT |
| 6141 | | region | ISSLQPDDFATYYCQSWDSTNSAVFGQGTKVEIK |
| | | humanized | |
| | | variant 5 | |
| SEQ | 15H6-LC_1 | 15H6 light | QYVLTQPPSASGTPGQRVTISCSGENLSDKYVHWYQQ |
| ID NO: | | chain variable | LPGTAPKMLIYENEKRPSGVPDRFSGSNSGNSASLAI |
| 6142 | | region | SGLQSEDEADYYCHYWESINSVVFGEGTELTVL |
| | | humanized | |
| | | variant 1 | |
| SEQ | 15H6-LC_2 | 15H6 light | QYVLTQPPSASGTPGQRVTISCSGENLSDKYVHWYQQ |
| ID NO: | | chain variable | LPGTAPKMLIYENEKRPSGVPDRFSGSNSGNSASLAI |
| 6143 | | region | SGLRSEDEADYYCHYWESINSVVFGEGTELTVL |
| | | humanized | |
| | | variant 2 | |
| SEQ | 15H6-LC_3 | 15H6 light | SYELTQPPSVSVSPGQTASITCSGENLSDKYVHWYQQ |
| ID NO: | | chain variable | KPGQSPVMVIYENEKRPSGIPERFSGSNSGNTATLTI |
| 6144 | | region | SGTQAMDEADYYCHYWESINSVVFGEGTELTVL |
| | | humanized | |
| | | variant 3 | |
| SEQ | 15H6-LC_4 | 15H6 light | DYVLTQSPLSLPVTPGEPASISCSGENLSDKYVHWYL |
| ID NO: | | chain variable | QKPGQSPQMLIYENEKRPSGVPDRFSGSNSGNDATLK |
| 6145 | | region | ISRVEAEDVGVYYCHYWESINSVVFGQGTKVEIK |
| | | humanized | |
| | | variant 4 | |
| SEQ | 15H6-LC_5 | 15H6 light | AYQLTQSPSSLSASVGDRVTITCSGENLSDKYVHWYQ |
| ID NO: | | chain variable | QKPGKAPKMLIYENEKRPSGVPSRFSGSNSGNDATLT |
| 6146 | | region | ISSLQPEDFATYYCHYWESINSVVFGQGTKVEIK |
| | | humanized | |
| | | variant 5 | |
| SEQ | 15H6-LC_6 | 15H6 light | EYVLTQSPATLSVSPGERATLSCSGENLSDKYVHWYQ |
| ID NO: | | chain variable | QKPGQAPRMLIYENEKRPSGIPARFSGSNSGNEATLT |
| 6147 | | region | ISSLQSEDFAVYYCHYWESINSVVFGQGTKVEIK |
| | | humanized | |
| | | variant 6 | |
| SEQ | 9D9-HC | 9D9 heavy | QIQLQESGPGLVKPSQSLSLSCSVTGFSINTGGYHWN |
| ID NO: | | chain variable | WIRQFPGKKVEWMGYIYSSGTTKYNPSLKSRISITRD |
| 7295 | | region | TSKNQFFLQLNSVTTEDTATYYCARGDWHYFDYWGQG |
| | | | TMVAVSS |
| SEQ | 9D9-LC | 9D9 light | SYTLTQPPLVSVALGQKATIICSGENLSDKYVHWYQQ |
| ID NO: | | chain variable | KPGRAPVMVIYENDKRPSGIPDQFSGSNSGNIATLTI |
| 7296 | | region | SKAQAGYEADYYCHCWDSTNSAVFGSGTHLTVL |
| SEQ | 3A12-HC | 3Al2 heavy | QIQLQESGPGLVKPSQSLSLTCSVTGFSINTGGYHWN |
| ID NO: | | chain variable | WIRQFPGKKLEWMGYIYSSGSTRYNPSLKSRFSITRD |
| 7297 | | region | TSKNQFFLQLNSVTTEDTATYYCTRGNWHYFDYWGQG |
| | | | TLVAVSS |
| SEQ | 3A12-LC | 3Al2 light | SYTLTQPPLVSVALGQKATIICSGENLSDKYVHWYQQ |
| ID NO: | | chain variable | KPGRAPVMVIYENDKRPSGIPDQFSGSNSGNIATLTI |
| 7296 | | region | SKAQAGYEADYYCHCWDSTNSAVFGSGTHLTVL |
| SEQ | 12D10-HC | 12D10 heavy | QIQLQESGPGLVKPSQSLSLTCSVTGFSINTGGYHWN |
| ID NO: | | chain variable | WIRQFPGKKLEWMGYIYSSGTTRYNPSLKSRISITRD |
| 6122 | | region | TSKNQFFLQLNSVTPEDTATYYCTRGNWHYFDYWGQG |
| | | | TLVAVSS |
| SEQ | 12D10-LC | 12D 10 light | SYTLTQPPSLSVAPGQKATIICSGENLSDKYVHWYQQ |
| ID NO: | | chain variable | KPGRAPVMVIYENEKRPSGIPDQFSGSNSGNIATLTI |
| 6136 | | region | SKAQPGSEADYYCHYWESINSVVFGSGTHLTVL |
| SEQ | 15E1-HC | 15E1 heavy | QIQLQESGPGLVKPSQSLSLSCSVTGFSITTTGYHWN |
| ID NO: | | chain variable | WIRQFPGKKLEWMGYIYSSGSTSYNPSLKSRFSITRD |
| 7298 | | region | TSKNQFFLQLNSVTTEDTATYYCARGDWHYFDYWG |
| | | | PGTMVTVSS |
| SEQ | 15E1-LC | 15E1 light | SFTLTQPPLVSVAVGQVATITCSGEKLSDKYVHWYQQ |
| ID NO: | | chain variable | KPGRAPVMVIYENDRRPSGIPDQFSGSNSGNIASLTI |
| 7299 | | region | SKAQAGDEADYFCQFWDSTNSAVFGGGTQLTVL |
| SEQ | 15E1_Humanized | 15E1 heavy | QIQLQESGPGLVKPSQTLSLTCTVSGFSITTTGYHWN |
| ID NO: | variant_VH1 | chain variable | WIRQHPGKGLEWIGYIYSSGSTSYNPSLKSLVTISRD |
| 7300 | | region | TSKNQFSLKLSSVTAADTAVYYCARGDWHYFDYWGQG |
| | | humanized | TMVTVSS |
| | | variant 1 | |
| SEQ | 15E1_Humanized | 15E1 heavy | QIQLVESGGGLVKPGGSLRLSCAVSGFSITTTGYHWN |
| ID NO: | variant_VH2 | chain variable | WIRQAPGKGLEWVGYIYSSGSTSYNPSLKSRFTISRD |
| 7301 | | region | TAKNSFYLQMNSLRAEDTAVYYCARGDWHYFDYWGQG |
| | | humanized | TMVTVSS |
| | | variant 2 | |
| SEQ | 15E1_Humanized | 15E1 heavy | EIQLLESGGGLVQPGGSLRLSCAVSGFSITTTGYHWN |
| ID NO: | variant_VH3 | chain variable | WVRQAPGKGLEWVGYIYSSGSTSYNPSLKSRFTISRD |
| 7302 | (BJM0407 | region | TSKNTFYLQMNSLRAEDTAVYYCARGDWHYFDYWGQG |
| | VH and | humanized | TMVTVSS |
| | BJM0411VH) | variant 3 | |
| SEQ | 15E1_Humanized | 15E1 heavy | EIQLVESGGGLVQPGGSLRLSCAVSGFSITTTGYHWN |
| ID NO: | variant_VH4 | chain variable | WVRQAPGKGLEWVGYIYSSGSTSYNPSLKSRFTISRD |
| 7303 | | region | TAKNSFYLQMNSLRAEDTAVYYCARGDWHYFDYWGQG |
| | | humanized | TMVTVSS |
| | | variant 4 | |
| SEQ | 15E1_Humanized | 15E1 heavy | QIQLVQSGAEVKKPGASVKVSCKVSGFSITTTGYHWN |
| ID NO: | variant_VH5 | chain variable | WVRQAPGQGLEWMGYIYSSGSTSYNPSLKSRVTMTRD |
| 7304 | | region | TSTNTFYMELSSLRSEDTAVYYCARGDWHYFDYWGQG |
| | | humanized | TMVTVSS |
| | | variant 5 | |
| SEQ | 15E1_Humanized | 15E1 light | SSETTQPPSVSVSPGQTASITCSGEKLSDKYVHWYQQ |
| ID NO: | variant_VL1 | chain variable | KPGQSPVMVIYENDRRPSGIPERFSGSNSGNTATLTI |
| 7305 | (BJM0407VL) | region | SGTQAMDEADYFCQFWDSTNSAVFGGGTQLTVL |
| | | humanized | |
| | | variant 1 | |
| SEQ | 15E1_Humanized | 15E1 light | SSETTQPHSVSVATAQMARITCSGEKLSDKYVHWYQQ |
| ID NO: | variant_VL2 | chain variable | KPGQDPVMVIYENDRRPSGIPERFSGSNPGNTATLTI |
| 7306 | | region | SRIEAGDEADYFCQFWDSTNSAVFGGGTQLTVL |
| | | humanized | |
| | | variant 2 | |
| SEQ | 15E1_Humanized | 15E1 light | QSVTTQPPSASGTPGQRVTISCSGEKLSDKYVHWYQQ |
| ID NO: | variant_VL3 | chain variable | LPGTAPKMLIYENDRRPSGVPDRFSGSNSGNSASLAI |
| 7307 | | region | SGLRSEDEADYFCQFWDSTNSAVFGGGTQLTVL |
| | | humanized | |
| | | variant 3 | |
| SEQ | 15E1_Humanized | 15E1 light | QSVTTQPPSVSGAPGQRVTISCSGEKLSDKYVHWYQQ |
| ID NO: | variant_VL4 | chain variable | LPGTAPKMLIYENDRRPSGVPDRFSGSNSGNSASLAI |
| 7308 | | region | TGLQAEDEADYFCQFWDSTNSAVFGGGTQLTVL |
| | | humanized | |
| | | variant 4 | |
| SEQ | 15E1_Humanized | 15E1 light | DSVTTQSPLSLPVTLGQPASISCSGEKLSDKYVHWYQ |
| ID NO: | variant_VL5 | chain variable | QRPGQSPRMLIYENDRRPSGVPDRFSGSNSGNDATLK |
| 7309 | (BJM0411VL) | region | ISRVEAEDVGVYFCQFWDSTNSAVFGGGTKVEIK |
| | | humanized | |
| | | variant 5 | |

TABLE 10
Exemplary NKp30-targeting antigen binding
domains/antibody molecules

| SEQ | | | |
|---|---|---|---|
| ID NO | Ab ID | Description | Sequence |
| SEQ | Ch(anti- | 9G1 heavy | QIQLQESGPGLVKPSQSLSLTCSVTGFSINTGGYHWNWIRQ |
| ID NO: | NKp30 | chain | FPGKKLEWMGYIYSSGSTSYNPSLKSRISITRDTSKNQFFL |
| 6148 | 9G1)HC | | QLNSVTTEDTATYYCARGNWHYFDFWGQGTMVTVSSASTKG |
| | N297A | | PSVFPLAPSSKSTSGGTAALGCLVKDYFPEPVTVSWNSGAL |
| | | | TSGVHTFPAVLQSSGLYSLSSVVTVPSSSLGTQTYICNVNH |
| | | | KPSNTKVDKRVEPKSCDKTHTCPPCPAPELLGGPSVFLFPP |
| | | | KPKDTLMISRTPEVTCVVVDVSHEDPEVKFNWYVDGVEVHN |
| | | | AKTKPREEQYASTYRVVSVLTVLHQDWLNGKEYKCKVSNKA |
| | | | LPAPIEKTISKAKGQPREPQVCTLPPSREEMTKNQVSLSCA |
| | | | VKGFYPSDIAVEWESNGQPENNYKTTPPVLDSDGSFFLVSK |
| | | | LTVDKSRWQQGNVFSCSVMHEALHNHYTQKSLSLSPGK |
| SEQ | Ch(anti- | 9G1 heavy | QIQLQESGPGLVKPSQSLSLTCSVTGFSINTGGYHWNWIRQ |
| ID NO: | NKp30 | chain | FPGKKLEWMGYIYSSGSTSYNPSLKSRISITRDTSKNQFFL |
| 6149 | 9G1)HC | | QLNSVTTEDTATYYCARGNWHYFDFWGQGTMVTVSSASTKG |
| | | | PSVFPLAPSSKSTSGGTAALGCLVKDYFPEPVTVSWNSGAL |
| | | | TSGVHTFPAVLQSSGLYSLSSVVTVPSSSLGTQTYICNVNH |
| | | | KPSNTKVDKRVEPKSCDKTHTCPPCPAPELLGGPSVFLFPP |
| | | | KPKDTLMISRTPEVTCVVVDVSHEDPEVKFNWYVDGVEVHN |
| | | | AKTKPREEQYNSTYRVVSVLTVLHQDWLNGKEYKCKVSNKA |
| | | | LPAPIEKTISKAKGQPREPQVCTLPPSREEMTKNQVSLSCA |
| | | | VKGFYPSDIAVEWESNGQPENNYKTTPPVLDSDGSFFLVSK |
| | | | LTVDKSRWQQGNVFSCSVMHEALHNHYTQKSLSLSPGK |
| SEQ | Ch(anti- | 9G1 light | SYTLTQPPLLSVALGHKATITCSGERLSDKYVHWYQQKPGR |
| ID NO: | NKp30 | chain | APVMVIYENDKRPSGIPDQFSGSNSGNIATLTISKAQAGYE |
| 6150 | 9G1)LC | | ADYYCQSWDSTNSAVFGSGTQLTVLGQPKANPTVTLFPPSS |
| | | | EELQANKATLVCLISDFYPGAVTVAWKADGSPVKAGVETTK |
| | | | PSKQSNNKYAASSYLSLTPEQWKSHRSYSCQVTHEGSTVEK |
| | | | TVAPTECS |
| SEQ | Ch(anti- | 15H6 heavy | QIQLQESGPGLVKPSQSLSLTCSVTGFSINTGGYHWNWIRQ |
| ID NO: | NKp30 | chain | FPGKKLEWMGYIYSSGTTRYNPSLKSRISITRDTSKNQFFL |
| 6151 | 15H6)HC | | QLNSVTPEDTATYYCTRGNWHYFDYWGQGTLVAVSSASTKG |
| | N297A | | PSVFPLAPSSKSTSGGTAALGCLVKDYFPEPVTVSWNSGAL |
| | | | TSGVHTFPAVLQSSGLYSLSSVVTVPSSSLGTQTYICNVNH |
| | | | KPSNTKVDKRVEPKSCDKTHTCPPCPAPELLGGPSVFLFPP |
| | | | KPKDTLMISRTPEVTCVVVDVSHEDPEVKFNWYVDGVEVHN |
| | | | AKTKPREEQYASTYRVVSVLTVLHQDWLNGKEYKCKVSNKA |
| | | | LPAPIEKTISKAKGQPREPQVCTLPPSREEMTKNQVSLSCA |
| | | | VKGFYPSDIAVEWESNGQPENNYKTTPPVLDSDGSFFLVSK |
| | | | LTVDKSRWQQGNVFSCSVMHEALHNHYTQKSLSLSPGK |
| SEQ | Ch(anti- | 15H6 heavy | QIQLQESGPGLVKPSQSLSLTCSVTGFSINTGGYHWNWIRQ |
| ID NO: | NKp30 | chain | FPGKKLEWMGYIYSSGTTRYNPSLKSRISITRDTSKNQFFL |
| 6152 | 15H6)HC | | QLNSVTPEDTATYYCTRGNWHYFDYWGQGTLVAVSSASTKG |
| | (hole) | | PSVFPLAPSSKSTSGGTAALGCLVKDYFPEPVTVSWNSGAL |
| | | | TSGVHTFPAVLQSSGLYSLSSVVTVPSSSLGTQTYICNVNH |
| | | | KPSNTKVDKRVEPKSCDKTHTCPPCPAPELLGGPSVFLFPP |
| | | | KPKDTLMISRTPEVTCVVVDVSHEDPEVKFNWYVDGVEVHN |
| | | | AKTKPREEQYNSTYRVVSVLTVLHQDWLNGKEYKCKVSNKA |
| | | | LPAPIEKTISKAKGQPREPQVCTLPPSREEMTKNQVSLSCA |
| | | | VKGFYPSDIAVEWESNGQPENNYKTTPPVLDSDGSFFLVSK |
| | | | LTVDKSRWQQGNVFSCSVMHEALHNHYTQKSLSLSPGK |
| SEQ | Ch(anti- | 15H6 light | SYTLTQPPSLSVAPGQKATIICSGENLSDKYVHWYQQKPGR |
| ID NO: | NKp30 | chain | APVMVIYENEKRPSGIPDQFSGSNSGNIATLTISKAQPGSE |
| 6153 | 15H6)LC | | ADYYCHYWESINSVVFGSGTHLTVLGQPKANPTVTLFPPSS |
| | | | EELQANKATLVCLISDFYPGAVTVAWKADGSPVKAGVETTK |
| | | | PSKQSNNKYAASSYLSLTPEQWKSHRSYSCQVTHEGSTVEK |
| | | | TVAPTECS |
| SEQ | BJM0859 | | EIQLLESGGGLVQPGGSLRLSCAVSGFSITTTGYHWNWVRQ |
| ID NO: | lambda | | APGKGLEWVGYIYSSGSTSYNPSLKSRFTISRDTSKNTFYL |
| 7310 | scFv | | QMNSLRAEDTAVYYCARGDWHYFDYWGQGTMVTVSSGGGGS |
| | | | GGGGSGGGGSGGGGSSSETTQPPSVSVSPGQTASITCSGEK |
| | | | LSDKYVHWYQQKPGQSPVMVIYENDRRPSGIPERFSGSNSG |
| | | | NTATLTISGTQAMDEADYFCQFWDSTNSAVFGGGTQLTVL |
| SEQ | BJM0860 | | EIQLLESGGGLVQPGGSLRLSCAVSGFSITTTGYHWNWVRQ |
| ID NO: | kappa | | APGKGLEWVGYIYSSGSTSYNPSLKSRFTISRDTSKNTFYL |
| 7311 | scFv | | QMNSLRAEDTAVYYCARGDWHYFDYWGQGTMVTVSSGGGGS |
| | | | GGGGSGGGGSGGGGSDSVTTQSPLSLPVTLGQPASISCSGE |
| | | | KLSDKYVHWYQQRPGQSPRMLIYENDRRPSGVPDRFSGSNS |
| | | | GNDATLKISRVEAEDVGVYFCQFWDSTNSAVFGGGTKVEIK |

[0251] In some embodiments, the NK cell engager is an antigen binding domain that binds to NKp46 (e.g., NKp46 present, e.g., expressed or displayed, on the surface of an NK cell) and comprises any CDR amino acid sequence, framework region (FWR) amino acid sequence, or variable region amino acid sequence disclosed in Table 15. In some embodiments, binding of the NK cell engager, e.g., antigen binding domain that binds to NKp46, to the NK cell activates the NK cell. An antigen binding domain that binds to NKp46 (e.g., NKp46 present, e.g., expressed or displayed, on the surface of an NK cell) may be said to target NKp46, the NK cell, or both.

[0252] In some embodiments, the NK cell engager is an antigen binding domain that binds to NKG2D (e.g., NKG2D present, e.g., expressed or displayed, on the surface of an NK cell) and comprises any CDR amino acid sequence, framework region (FWR) amino acid sequence, or variable region amino acid sequence disclosed in Table 15. In some embodiments, binding of the NK cell engager, e.g., antigen binding domain that binds to NKG2D, to the NK cell activates the NK cell. An antigen binding domain that binds to NKG2D (e.g., NKG2D present, e.g., expressed or displayed, on the surface of an NK cell) may be said to target NKG2D, the NK cell, or both.

[0253] In some embodiments, the NK cell engager is an antigen binding domain that binds to CD16 (e.g., CD16 present, e.g., expressed or displayed, on the surface of an NK cell) and comprises any CDR amino acid sequence, framework region (FWR) amino acid sequence, or variable region amino acid sequence disclosed in Table 15. In some embodiments, binding of the NK cell engager, e.g., antigen binding domain that binds to CD16, to the NK cell activates the NK cell. An antigen binding domain that binds to CD16 (e.g., CD16 present, e.g., expressed or displayed, on the surface of an NK cell) may be said to target CD16, the NK cell, or both.

TABLE 15
Exemplary variable regions of NKp46, NKG2D,
or CD16-targeting antigen binding domains

| SEQ | | | |
|---|---|---|---|
| ID NO | Ab ID | Description | Sequence |
| SEQ | NKG2D_1scFv | scFv that | QVHLQESGPGLVKPSETLSLTCTVSDDSISSYYWSWIRQ |
| ID NO: | | binds | PPGKGLEWIGHISYSGSANYNPSLKSRVTISVDTSKNQF |
| 6175 | | NKG2D | SLKLSSVTAADTAVYYCANWDDAFNIWGQGTMVTVSSGG |
| | | | GGSGGGGSGGGGSGGGGSEIVLTQSPGTLSLSPGERATL |
| | | | SCRASQSVSSSYLAWYQQKPGQAPRLLIYGASSRATGIP |
| | | | DRFSGSGSGTDFTLTISRLEPEDFAVYYCQQYGSSPWTF |
| | | | GQGTKVEIK |
| SEQ | NKG2D_1VH | VH that | QVHLQESGPGLVKPSETLSLTCTVSDDSISSYYWSWIRQ |
| ID NO: | | binds | PPGKGLEWIGHISYSGSANYNPSLKSRVTISVDTSKNQF |
| 6176 | | NKG2D | SLKLSSVTAADTAVYYCANWDDAFNIWGQGTMVTVSS |
| SEQ | NKG2D_1VL | VL that | EIVLTQSPGTLSLSPGERATLSCRASQSVSSSYLAWYQQ |
| ID NO: | | binds | KPGQAPRLLIYGASSRATGIPDRFSGSGSGTDFTLTISR |
| 6177 | | NKG2D | LEPEDFAVYYCQQYGSSPWTFGQGTKVEIK |
| SEQ | NKG2D_2scFv | scFv that | EVQLVQSGAEVKEPGESLKISCKNSGYSFTNYWVGWVRQ |
| ID NO: | | binds | MPGKGLEWMGIIYPGDSDTRYSPSFQGQVTISADKSINT |
| 6178 | | NKG2D | AYLQWSSLKASDTAMYYCGRLTMFRGIIIGYFDYWGQGT |
| | | | LVTVSSGGGGSGGGGSGGGGSGGGGSEIVLTQSPATLSL |
| | | | SPGERATLSCRASQSVSSYLAWYQQKPGQAPRLLIYDAS |
| | | | NRATGIPARFSGSGSGTDFTLTISSLEPEDFAVYYCQQR |
| | | | SNWPWTFGQGTKVEIK |
| SEQ | NKG2D_2VH | VH that | EVQLVQSGAEVKEPGESLKISCKNSGYSFTNYWVGWVRQ |
| ID NO: | | binds | MPGKGLEWMGIIYPGDSDTRYSPSFQGQVTISADKSINT |
| 6179 | | NKG2D | AYLQWSSLKASDTAMYYCGRLTMFRGIIIGYFDYWGQGT |
| | | | LVTVSS |
| SEQ | NKG2D_2VL | VL that | EIVLTQSPATLSLSPGERATLSCRASQSVSSYLAWYQQK |
| ID NO: | | binds | PGQAPRLLIYDASNRATGIPARFSGSGSGTDFTLTISSL |
| 6180 | | NKG2D | EPEDFAVYYCQQRSNWPWTFGQGTKVEIK |
| SEQ | NKp46scFv | scFv that | QVQLQQSGPELVKPGASVKMSCKASGYTFTDYVINWGKQ |
| ID NO: | | binds NKp46 | RSGQGLEWIGEIYPGSGTNYYNEKFKAKATLTADKSSNI |
| 6181 | | | AYMQLSSLTSEDSAVYFCARRGRYGLYAMDYWGQGTSVT |
| | | | VSSGGGGSGGGGSGGGGSGGGGSDIQMTQTTSSLSASLG |
| | | | DRVTISCRASQDISNYLNWYQQKPDGTVKLLIYYTSRLH |
| | | | SGVPSRFSGSGSGTDYSLTINNLEQEDIATYFCQQGNTR |
| | | | PWTFGGGTKLEIK |
| SEQ | NKp46VH | VH that | QVQLQQSGPELVKPGASVKMSCKASGYTFTDYVINWGKQ |
| ID NO: | | binds NKp46 | RSGQGLEWIGEIYPGSGTNYYNEKFKAKATLTADKSSNI |
| 6182 | | | AYMQLSSLTSEDSAVYFCARRGRYGLYAMDYWGQGTSVT |
| | | | VSS |
| SEQ | NKp46VL | VL that | DIQMTQTTSSLSASLGDRVTISCRASQDISNYLNWYQQK |
| ID NO: | | binds NKp46 | PDGTVKLLIYYTSRLHSGVPSRFSGSGSGTDYSLTINNL |
| 6183 | | | EQEDIATYFCQQGNTRPWTFGGGTKLEIK |
| SEQ | CD16scFv | scFv that | EVQLVESGGGVVRPGGSLRLSCAASGFTFDDYGMSWVRQ |
| ID NO: | | binds CD16 | APGKGLEWVSGINWNGGSTGYADSVKGRFTISRDNAKNS |
| 6184 | | | LYLQMNSLRAEDTAVYYCARGRSLLFDYWGQGTLVTVSR |
| | | | GGGGSGGGGSGGGGSSELTQDPAVSVALGQTVRITCQGD |
| | | | SLRSYYASWYQQKPGQAPVLVIYGKNNRPSGIPDRFSGS |
| | | | SSGNTASLTITGAQAEDEADYYCNSRDSSGNHVVFGGGT |
| | | | KLTVL |
| SEQ | CD16VH | VH that | EVQLVESGGGVVRPGGSLRLSCAASGFTFDDYGMSWVRQ |
| ID NO: | | binds CD16 | APGKGLEWVSGINWNGGSTGYADSVKGRFTISRDNAKNS |
| 6185 | | | LYLQMNSLRAEDTAVYYCARGRSLLFDYWGQGTLVTVSR |
| SEQ | CD16VL | VL that | SSELTQDPAVSVALGQTVRITCQGDSLRSYYASWYQQKP |
| ID NO: | | binds CD16 | GQAPVLVIYGKNNRPSGIPDRFSGSSSGNTASLTITGAQ |
| 6186 | | | AEDEADYYCNSRDSSGNHVVFGGGTKLTVL |

[0254] In one embodiment, the NK cell engager is a ligand of NKp30, e.g., is a B7-6, e.g., comprises the amino acid sequence of: DLKVEMMAGGTQITPLNDNVTIFCNIFYSQPLNITSMGITWFWKSLTFDKEVKVFEFFGD HQEAFRPGAIVSPWRLKSGDASLRLPGIQLEEAGEYRCEVVVTPLKAQGTVQLEVVASP ASRLLLDQVGMKENEDKYMCESSGFYPEAINITWEKQTQKFPHPIEISEDVITGPTIKNM DGTFNVTSCLKLNSSQEDPGTVYQCVVRHASLHTPLRSNFTLTAARHSLSETEKTDNFS (SEQ ID NO: 7233), a fragment thereof, or an amino acid sequence substantially identical thereto (e.g., 95% to 99.9% identical thereto, or having at least one amino acid alteration, but not more than five, ten or fifteen alterations (e.g., substitutions, deletions, or insertions, e.g., conservative substitutions) to the amino acid sequence of SEQ ID NO: 7233.

[0255] In other embodiments, the NK cell engager is a ligand of NKp44 or NKp46, which is a viral HA. Viral hemagglutinins (HA) are glyco proteins which are on the surface of viruses. HA proteins allow viruses to bind to the membrane of cells via sialic acid sugar moieties which contributes to the fusion of viral membranes with the cell membranes (see e.g., Eur J Immunol. 2001 September; 31(9):2680-9 “Recognition of viral hemagglutinins by NKp44 but not by NKp30”; and Nature. 2001 Feb. 22; 409(6823):1055-60 “Recognition of haemaglutinins on virus-infected cells by NKp46 activates lysis by human NK cells” the contents of each of which are incorporated by reference herein).

[0256] In other embodiments, the NK cell engager is a ligand of NKG2D chosen from MICA, MICB, or ULBP1, e.g., wherein:

(i) MICA comprises the amino acid sequence: EPHSLRYNLTVLSWDGSVQSGFLTEVHLDGQPFLRCDRQKCRAKPQGQWAEDVLGNK TWDRETRDLTGNGKDLRMTLAHIKDQKEGLHSLQEIRVCEIHEDNSTRSSQHFYYDGEL FLSQNLETKEWTMPQSSRAQTLAMNVRNFLKEDAMKTKTHYHAMHADCLQELRRYLK SGVVLRRTVPPMVNVTRSEASEGNITVTCRASGFYPWNITLSWRQDGVSLSHDTQQWG DVLPDGNGTYQTWVATRICQGEEQRFTCYMEHSGNHSTHPVPSGKVLVLQSHW (SEQ ID NO: 7234), a fragment thereof, or an amino acid sequence substantially identical thereto (e.g., 95% to 99.9% identical thereto, or having at least one amino acid alteration, but not more than five, ten or fifteen alterations (e.g., substitutions, deletions, or insertions, e.g., conservative substitutions) to the amino acid sequence of SEQ ID NO: 7234;
(ii) MICB comprises the amino acid sequence: AEPHSLRYNLMVLSQDESVQSGFLAEGHLDGQPFLRYDRQKRRAKPQGQWAEDVLGA KTWDTETEDLTENGQDLRRTLTHIKDQKGGLHSLQEIRVCEIHEDSSTRGSRHFYYDGEL FLSQNLETQESTVPQSSRAQTLAMNVTNFWKEDAMKTKTHYRAMQADCLQKLQRYLK SGVAIRRTVPPMVNVTCSEVSEGNITVTCRASSFYPRNITLTWRQDGVSLSHNTQQWGD VLPDGNGTYQTWVATRIRQGEEQRFTCYMEHSGNHGTHPVPSGKVLVLQSQRTD (SEQ ID NO: 7235), a fragment thereof, or an amino acid sequence substantially identical thereto (e.g., 95% to 99.9% identical thereto, or having at least one amino acid alteration, but not more than five, ten or fifteen alterations (e.g., substitutions, deletions, or insertions, e.g., conservative substitutions) to the amino acid sequence of SEQ ID NO: 7235; or
(iii) ULBP1 comprises the amino acid sequence: GWVDTHCLCYDFIITPKSRPEPQWCEVQGLVDERPFLHYDCVNHKAKAFASLGKKVNV TKTWEEQTETLRDVVDFLKGQLLDIQVENLIPIEPLTLQARMSCEHEAHGHGRGSWQFL FNGQKFLLFDSNNRKWTALHPGAKKMTEKWEKNRDVTMFFQKISLGDCKMWLEEFL MYWEQMLDPTKPPSLAPG (SEQ ID NO: 7236), a fragment thereof, or an amino acid sequence substantially identical thereto (e.g., 95% to 99.9% identical thereto, or having at least one amino acid alteration, but not more than five, ten or fifteen alterations (e.g., substitutions, deletions, or insertions, e.g., conservative substitutions) to the amino acid sequence of SEQ ID NO: 7236.

[0257] In other embodiments, the NK cell engager is a ligand of DNAM1 chosen from NECTIN2 or NECL5, e.g., wherein:

(i) NECTIN2 comprises the amino acid sequence: QDVRVQVLPEVRGQLGGTVELPCHLLPPVPGLYISLVTWQRPDAPANHQNVAAFHPKM GPSFPSPKPGSERLSFVSAKQSTGQDTEAELQDATLALHGLTVEDEGNYTCEFATFPKGS VRGMTWLRVIAKPKNQAEAQKVTFSQDPTTVALCISKEGRPPARISWLSSLDWEAKETQ VSGTLAGTVTVTSRFTLVPSGRADGVTVTCKVEHESFEEPALIPVTLSVRYPPEVSISGYD DNWYLGRTDATLSCDVRSNPEPTGYDWSTTSGTFPTSAVAQGSQLVIHAVDSLFNTTFV CTVTNAVGMGRAEQVIFVRETPNTAGAGATGG (SEQ ID NO: 7237), a fragment thereof, or an amino acid sequence substantially identical thereto (e.g., 95% to 99.9% identical thereto, or having at least one amino acid alteration, but not more than five, ten or fifteen alterations (e.g., substitutions, deletions, or insertions, e.g., conservative substitutions) to the amino acid sequence of SEQ ID NO: 7237; or
(ii) NECL5 comprises the amino acid sequence: WPPPGTGDVVVQAPTQVPGFLGDSVTLPCYLQVPNMEVTHVSQLTWARHGESGSMAV FHQTQGPSYSESKRLEFVAARLGAELRNASLRMFGLRVEDEGNYTCLFVTFPQGSRSVD IWLRVLAKPQNTAEVQKVQLTGEPVPMARCVSTGGRPPAQITWHSDLGGMPNTSQVPG FLSGTVTVTSLWILVPSSQVDGKNVTCKVEHESFEKPQLLTVNLTVYYPPEVSISGYDNN WYLGQNEATLTCDARSNPEPTGYNWSTTMGPLPPFAVAQGAQLLIRPVDKPINTTLICN VTNALGARQAELTVQVKEGPPSEHSGISRN (SEQ ID NO: 7238), a fragment thereof, or an amino acid sequence substantially identical thereto (e.g., 95% to 99.9% identical thereto, or having at least one amino acid alteration, but not more than five, ten or fifteen alterations (e.g., substitutions, deletions, or insertions, e.g., conservative substitutions) to the amino acid sequence of SEQ ID NO: 7238.

[0258] In yet other embodiments, the NK cell engager is a ligand of DAP10, which is an adapter for NKG2D (see e.g., Proc Natl Acad Sci USA. 2005 May 24; 102(21): 7641-7646; and Blood, 15 Sep. 2011 Volume 118, Number 11, the full contents of each of which is incorporated by reference herein).

[0259] In other embodiments, the NK cell engager is a ligand of CD16, which is a CD16a/b ligand, e.g., a CD16a/b ligand further comprising an antibody Fc region (see e.g., Front Immunol. 2013; 4: 76 discusses how antibodies use the Fc to trigger NK cells through CD16, the full contents of which are incorporated herein).

[0260] In other embodiments, the NK cell engager is a ligand of CRTAM, which is NECL2, e.g., wherein NECL2 comprises the amino acid sequence: QNLFTKDVTVIEGEVATISCQVNKSDDSVIQLLNPNRQTIYFRDFRPLKDSRFQLLNFSSS ELKVSLTNVSISDEGRYFCQLYTDPPQESYTTITVLVPPRNLMIDIQKDTAVEGEEIEVNC TAMASKPATTIRWFKGNTELKGKSEVEEWSDMYTVTSQLMLKVHKEDDGVPVICQVE HPAVTGNLQTQRYLEVQYKPQVHIQMTYPLQGLTREGDALELTCEAIGKPQPVMVTWV RVDDEMPQHAVLSGPNLFINNLNKTDNGTYRCEASNIVGKAHSDYMLYVYDPPTTIPPP TTTTTTTTTTTTTILTIITDSRAGEEGSIRAVDH (SEQ ID NO: 7239), a fragment thereof, or an amino acid sequence substantially identical thereto (e.g., 95% to 99.9% identical thereto, or having at least one amino acid alteration, but not more than five, ten or fifteen alterations (e.g., substitutions, deletions, or insertions, e.g., conservative substitutions) to the amino acid sequence of SEQ ID NO: 7239.

[0261] In other embodiments, the NK cell engager is a ligand of CD27, which is CD70, e.g., wherein CD70 comprises the amino acid sequence: QRFAQAQQQLPLESLGWDVAELQLNHTGPQQDPRLYWQGGPALGRSFLHGPELDKGQ LRIHRDGIYMVHIQVTLAICSSTTASRHHPTTLAVGICSPASRSISLLRLSFHQGCTIASQR LTPLARGDTLCTNLTGTLLPSRNTDETFFGVQWVRP (SEQ ID NO: 7240), a fragment thereof, or an amino acid sequence substantially identical thereto (e.g., 95% to 99.9% identical thereto, or having at least one amino acid alteration, but not more than five, ten or fifteen alterations (e.g., substitutions, deletions, or insertions, e.g., conservative substitutions) to the amino acid sequence of SEQ ID NO: 7240.

[0262] In other embodiments, the NK cell engager is a ligand of PSGL1, which is L-selectin (CD62L), e.g., wherein L-selectin comprises the amino acid sequence: WTYHYSEKPMNWQRARRFCRDNYTDLVAIQNKAEIEYLEKTLPFSRSYYWIGIRKIGGI WTWVGTNKSLTEEAENWGDGEPNNKKNKEDCVEIYIKRNKDAGKWNDDACHKLKAA LCYTASCQPWSCSGHGECVEIINNYTCNCDVGYYGPQCQFVIQCEPLEAPELGTMDCTH PLGNFSFSSQCAFSCSEGTNLTGIEETTCGPFGNWSSPEPTCQVIQCEPLSAPDLGIMNCSH PLASFSFTSACTFICSEGTELIGKKKTICESSGIWSNPSPICQKLDKSFSMIKEGDYN (SEQ ID NO: 7241), a fragment thereof, or an amino acid sequence substantially identical thereto (e.g., 95% to 99.9% identical thereto, or having at least one amino acid alteration, but not more than five, ten or fifteen alterations (e.g., substitutions, deletions, or insertions, e.g., conservative substitutions) to the amino acid sequence of SEQ ID NO: 7241.

[0263] In other embodiments, the NK cell engager is a ligand of CD96, which is NECL5, e.g., wherein NECL5 comprises the amino acid sequence: WPPPGTGDVVVQAPTQVPGFLGDSVTLPCYLQVPNMEVTHVSQLTWARHGESGSMAV FHQTQGPSYSESKRLEFVAARLGAELRNASLRMFGLRVEDEGNYTCLFVTFPQGSRSVD IWLRVLAKPQNTAEVQKVQLTGEPVPMARCVSTGGRPPAQITWHSDLGGMPNTSQVPG FLSGTVTVTSLWILVPSSQVDGKNVTCKVEHESFEKPQLLTVNLTVYYPPEVSISGYDNN WYLGQNEATLTCDARSNPEPTGYNWSTTMGPLPPFAVAQGAQLLIRPVDKPINTTLICN VTNALGARQAELTVQVKEGPPSEHSGISRN (SEQ ID NO: 7238), a fragment thereof, or an amino acid sequence substantially identical thereto (e.g., 95% to 99.9% identical thereto, or having at least one amino acid alteration, but not more than five, ten or fifteen alterations (e.g., substitutions, deletions, or insertions, e.g., conservative substitutions) to the amino acid sequence of SEQ ID NO: 7238.

[0264] In other embodiments, the NK cell engager is a ligand of CD100 (SEMA4D), which is CD72, e.g., wherein CD72 comprises the amino acid sequence: RYLQVSQQLQQTNRVLEVTNSSLRQQLRLKITQLGQSAEDLQGSRRELAQSQEALQVEQ RAHQAAEGQLQACQADRQKTKETLQSEEQQRRALEQKLSNMENRLKPFFTCGSADTCC PSGWIMHQKSCFYISLTSKNWQESQKQCETLSSKLATFSEIYPQSHSYYFLNSLLPNGGS GNSYWTGLSSNKDWKLTDDTQRTRTYAQSSKCNKVHKTWSWWTLESESCRSSLPYICE MTAFRFPD (SEQ ID NO: 7242), a fragment thereof, or an amino acid sequence substantially identical thereto (e.g., 95% to 99.9% identical thereto, or having at least one amino acid alteration, but not more than five, ten or fifteen alterations (e.g., substitutions, deletions, or insertions, e.g., conservative substitutions) to the amino acid sequence of SEQ ID NO: 7242.

[0265] In other embodiments, the NK cell engager is a ligand of NKp80, which is CLEC2B (AICL), e.g., wherein CLEC2B (AICL) comprises the amino acid sequence: KLTRDSQSLCPYDWIGFQNKCYYFSKEEGDWNSSKYNCSTQHADLTIIDNIEEMNFLRR YKCSSDHWIGLKMAKNRTGQWVDGATFTKSFGMRGSEGCAYLSDDGAATARCYTER KWICRKRIH (SEQ ID NO: 7243), a fragment thereof, or an amino acid sequence substantially identical thereto (e.g., 95% to 99.9% identical thereto, or having at least one amino acid alteration, but not more than five, ten or fifteen alterations (e.g., substitutions, deletions, or insertions, e.g., conservative substitutions) to the amino acid sequence of SEQ ID NO: 7243.

[0266] In other embodiments, the NK cell engager is a ligand of CD244, which is CD48, e.g., wherein CD48 comprises the amino acid sequence: QGHLVHMTVVSGSNVTLNISESLPENYKQLTWFYTFDQKIVEWDSRKSKYFESKFKGR VRLDPQSGALYISKVQKEDNSTYIMRVLKKTGNEQEWKIKLQVLDPVPKPVIKIEKIEDM DDNCYLKLSCVIPGESVNYTWYGDKRPFPKELQNSVLETTLMPHNYSRCYTCQVSNSVS SKNGTVCLSPPCTLARS (SEQ ID NO: 7244), a fragment thereof, or an amino acid sequence substantially identical thereto (e.g., 95% to 99.9% identical thereto, or having at least one amino acid alteration, but not more than five, ten or fifteen alterations (e.g., substitutions, deletions, or insertions, e.g., conservative substitutions) to the amino acid sequence of SEQ ID NO: 7244.

[0267] In some embodiments, the NK cell engager is a viral hemagglutinin (HA), HA is a glycoprotein found on the surface of influenza viruses. It is responsible for binding the virus to cells with sialic acid on the membranes, such as cells in the upper respiratory tract or erythrocytes. HA has at least 18 different antigens. These subtypes are named H1 through H18. NCRs can recognize viral proteins. NKp46 has been shown to be able to interact with the HA of influenza and the HA-NA of Paramyxovirus, including Sendai virus and Newcastle disease virus. Besides NKp46, NKp44 can also functionally interact with HA of different influenza subtypes.

### Antibody Molecules

[0268] In an embodiment, the anti-NKp30 antibody molecule is a monospecific antibody molecule and binds a single epitope on NKp30. E.g., a monospecific antibody molecule having a plurality of immunoglobulin variable domain sequences, each of which binds the same epitope.

[0269] In another embodiment, the anti-NKp30 antibody molecule is a multispecific or multifunctional antibody molecule, e.g., it comprises a plurality of immunoglobulin variable domains sequences, wherein a first immunoglobulin variable domain sequence of the plurality has binding specificity for a first epitope and a second immunoglobulin variable domain sequence of the plurality has binding specificity for a second epitope. In an embodiment the first and second epitopes are on the same antigen, e.g., the same protein (or subunit of a multimeric protein). In an embodiment the first and second epitopes overlap. In an embodiment the first and second epitopes do not overlap. In an embodiment the first and second epitopes are on different antigens, e.g., the different proteins (or different subunits of a multimeric protein). In an embodiment a multispecific antibody molecule comprises a third, fourth or fifth immunoglobulin variable domain. In an embodiment, a multispecific antibody molecule is a bispecific antibody molecule, a trispecific antibody molecule, or a tetraspecific antibody molecule.

[0270] In an embodiment a multispecific antibody molecule is a bispecific antibody molecule. A bispecific antibody has specificity for no more than two antigens. A bispecific antibody molecule is characterized by a first immunoglobulin variable domain sequence which has binding specificity for a first epitope and a second immunoglobulin variable domain sequence that has binding specificity for a second epitope. In an embodiment the first and second epitopes are on the same antigen, e.g., the same protein (or subunit of a multimeric protein). In an embodiment the first and second epitopes overlap. In an embodiment the first and second epitopes do not overlap. In an embodiment the first and second epitopes are on different antigens, e.g., the different proteins (or different subunits of a multimeric protein). In an embodiment a bispecific antibody molecule comprises a heavy chain variable domain sequence and a light chain variable domain sequence which have binding specificity for a first epitope and a heavy chain variable domain sequence and a light chain variable domain sequence which have binding specificity for a second epitope. In an embodiment a bispecific antibody molecule comprises a half antibody having binding specificity for a first epitope and a half antibody having binding specificity for a second epitope. In an embodiment a bispecific antibody molecule comprises a half antibody, or fragment thereof, having binding specificity for a first epitope and a half antibody, or fragment thereof, having binding specificity for a second epitope. In an embodiment a bispecific antibody molecule comprises a scFv or a Fab, or fragment thereof, have binding specificity for a first epitope and a scFv or a Fab, or fragment thereof, have binding specificity for a second epitope.

[0271] In an embodiment, an antibody molecule comprises a diabody, and a single-chain molecule, as well as an antigen-binding fragment of an antibody (e.g., Fab, F(ab′)₂, and Fv). For example, an antibody molecule can include a heavy (H) chain variable domain sequence (abbreviated herein as VH), and a light (L) chain variable domain sequence (abbreviated herein as VL). In an embodiment an antibody molecule comprises or consists of a heavy chain and a light chain (referred to herein as a half antibody. In another example, an antibody molecule includes two heavy (H) chain variable domain sequences and two light (L) chain variable domain sequence, thereby forming two antigen binding sites, such as Fab, Fab′, F(ab′)₂, Fc, Fd, Fd′, Fv, single chain antibodies (scFv for example), single variable domain antibodies, diabodies (Dab) (bivalent and bispecific), and chimeric (e.g., humanized) antibodies, which may be produced by the modification of whole antibodies or those synthesized de novo using recombinant DNA technologies. These functional antibody fragments retain the ability to selectively bind with their respective antigen or receptor. Antibodies and antibody fragments can be from any class of antibodies including, but not limited to, IgG, IgA, IgM, IgD, and IgE, and from any subclass (e.g., IgG1, IgG2, IgG3, and IgG4) of antibodies. The preparation of antibody molecules can be monoclonal or polyclonal. An antibody molecule can also be a human, humanized, CDR-grafted, or in vitro generated antibody. The antibody can have a heavy chain constant region chosen from, e.g., IgG1, IgG2, IgG3, or IgG4. The antibody can also have a light chain chosen from, e.g., kappa or lambda. The term “immunoglobulin” (Ig) is used interchangeably with the term “antibody” herein.

[0272] Examples of antigen-binding fragments of an antibody molecule include: (i) a Fab fragment, a monovalent fragment consisting of the VL, VH, CL and CH1 domains; (ii) a F(ab′)2 fragment, a bivalent fragment comprising two Fab fragments linked by a disulfide bridge at the hinge region; (iii) a Fd fragment consisting of the VH and CH1 domains; (iv) a Fv fragment consisting of the VL and VH domains of a single arm of an antibody, (v) a diabody (dAb) fragment, which consists of a VH domain; (vi) a camelid or camelized variable domain; (vii) a single chain Fv (scFv), see e.g., Bird et al. (1988) Science 242:423-426; and Huston et al. (1988) Proc. Natl. Acad. Sci. USA 85:5879-5883); (viii) a single domain antibody. These antibody fragments are obtained using conventional techniques known to those with skill in the art, and the fragments are screened for utility in the same manner as are intact antibodies.

[0273] Antibody molecules include intact molecules as well as functional fragments thereof. Constant regions of the antibody molecules can be altered, e.g., mutated, to modify the properties of the antibody (e.g., to increase or decrease one or more of: Fc receptor binding, antibody glycosylation, the number of cysteine residues, effector cell function, or complement function).

[0274] Antibody molecules can also be single domain antibodies. Single domain antibodies can include antibodies whose complementary determining regions are part of a single domain polypeptide. Examples include, but are not limited to, heavy chain antibodies, antibodies naturally devoid of light chains, single domain antibodies derived from conventional 4-chain antibodies, engineered antibodies and single domain scaffolds other than those derived from antibodies. Single domain antibodies may be any of the art, or any future single domain antibodies. Single domain antibodies may be derived from any species including, but not limited to mouse, human, camel, llama, fish, shark, goat, rabbit, and bovine. According to another aspect of the invention, a single domain antibody is a naturally occurring single domain antibody known as heavy chain antibody devoid of light chains. Such single domain antibodies are disclosed in WO 9404678, for example. For clarity reasons, this variable domain derived from a heavy chain antibody naturally devoid of light chain is known herein as a VHH or nanobody to distinguish it from the conventional VH of four chain immunoglobulins. Such a VHH molecule can be derived from antibodies raised in Camelidae species, for example in camel, llama, dromedary, alpaca and guanaco. Other species besides Camelidae may produce heavy chain antibodies naturally devoid of light chain; such VHHs are within the scope of the invention.

[0275] The VH and VL regions can be subdivided into regions of hypervariability, termed “complementarity determining regions” (CDR), interspersed with regions that are more conserved, termed “framework regions” (FR or FW).

[0276] The extent of the framework region and CDRs has been precisely defined by a number of methods (see, Kabat, E. A., et al. (1991) Sequences of Proteins of Immunological Interest, Fifth Edition, U.S. Department of Health and Human Services, NIH Publication No. 91-3242; Chothia, C. et al. (1987) J. Mol. Biol. 196:901-917; and the AbM definition used by Oxford Molecular's AbM antibody modeling software. See, generally, e.g., Protein Sequence and Structure Analysis of Antibody Variable Domains. In: Antibody Engineering Lab Manual (Ed.: Duebel, S. and Kontermann, R., Springer-Verlag, Heidelberg).

[0277] The terms “complementarity determining region,” and “CDR,” as used herein refer to the sequences of amino acids within antibody variable regions which confer antigen specificity and binding affinity. In general, there are three CDRs in each heavy chain variable region (HCDR1, HCDR2, HCDR3) and three CDRs in each light chain variable region (LCDR1, LCDR2, LCDR3).

[0278] The precise amino acid sequence boundaries of a given CDR can be determined using any of a number of known schemes, including those described by Kabat et al. (1991), “Sequences of Proteins of Immunological Interest,” 5th Ed. Public Health Service, National Institutes of Health, Bethesda, Md. (“Kabat” numbering scheme), Al-Lazikani et al., (1997) JMB 273, 927-948 (“Chothia” numbering scheme). As used herein, the CDRs defined according the “Chothia” number scheme are also sometimes referred to as “hypervariable loops.”

[0279] For example, under Kabat, the CDR amino acid residues in the heavy chain variable domain (VH) are numbered 31-35 (HCDR1), 50-65 (HCDR2), and 95-102 (HCDR3); and the CDR amino acid residues in the light chain variable domain (VL) are numbered 24-34 (LCDR1), 50-56 (LCDR2), and 89-97 (LCDR3). Under Chothia, the CDR amino acids in the VH are numbered 26-32 (HCDR1), 52-56 (HCDR2), and 95-102 (HCDR3); and the amino acid residues in VL are numbered 26-32 (LCDR1), 50-52 (LCDR2), and 91-96 (LCDR3).

[0280] Each VH and VL typically includes three CDRs and four FRs, arranged from amino-terminus to carboxy-terminus in the following order: FR1, CDR1, FR2, CDR2, FR3, CDR3, FR4.

[0281] The antibody molecule can be a polyclonal or a monoclonal antibody.

[0282] The terms “monoclonal antibody” or “monoclonal antibody composition” as used herein refer to a preparation of antibody molecules of single molecular composition. A monoclonal antibody composition displays a single binding specificity and affinity for a particular epitope. A monoclonal antibody can be made by hybridoma technology or by methods that do not use hybridoma technology (e.g., recombinant methods).

[0283] The antibody can be recombinantly produced, e.g., produced by phage display or by combinatorial methods.

[0284] Phage display and combinatorial methods for generating antibodies are known in the art (as described in, e.g., Ladner et al. U.S. Pat. No. 5,223,409; Kang et al. International Publication No. WO 92/18619; Dower et al. International Publication No. WO 91/17271; Winter et al. International Publication WO 92/20791; Markland et al. International Publication No. WO 92/15679; Breitling et al. International Publication WO 93/01288; McCafferty et al. International Publication No. WO 92/01047; Garrard et al. International Publication No. WO 92/09690; Ladner et al. International Publication No. WO 90/02809; Fuchs et al. (1991) Bio/Technology 9:1370-1372; Hay et al. (1992) Hum Antibody Hybridomas 3:81-85; Huse et al. (1989) Science 246:1275-1281; Griffths et al. (1993) EMBO J 12:725-734; Hawkins et al. (1992) J Mol Biol 226:889-896; Clackson et al. (1991) Nature 352:624-628; Gram et al. (1992) PNAS 89:3576-3580; Garrad et al. (1991) Bio/Technology 9:1373-1377; Hoogenboom et al. (1991) Nuc Acid Res 19:4133-4137; and Barbas et al. (1991) PNAS 88:7978-7982, the contents of all of which are incorporated by reference herein).

[0285] In one embodiment, the antibody is a fully human antibody (e.g., an antibody made in a mouse which has been genetically engineered to produce an antibody from a human immunoglobulin sequence), or a non-human antibody, e.g., a rodent (mouse or rat), goat, primate (e.g., monkey), camel antibody. Preferably, the non-human antibody is a rodent (mouse or rat antibody). Methods of producing rodent antibodies are known in the art.

[0286] Human monoclonal antibodies can be generated using transgenic mice carrying the human immunoglobulin genes rather than the mouse system. Splenocytes from these transgenic mice immunized with the antigen of interest are used to produce hybridomas that secrete human mAbs with specific affinities for epitopes from a human protein (see, e.g., Wood et al. International Application WO 91/00906, Kucherlapati et al. PCT publication WO 91/10741; Lonberg et al. International Application WO 92/03918; Kay et al. International Application 92/03917; Lonberg, N. et al. 1994 Nature 368:856-859; Green, L. L. et al. 1994 Nature Genet. 7:13-21; Morrison, S. L. et al. 1994 Proc. Natl. Acad. Sci. USA 81:6851-6855; Bruggeman et al. 1993 Year Immunol 7:33-40; Tuaillon et al. 1993 PNAS 90:3720-3724; Bruggeman et al. 1991 Eur J Immunol 21:1323-1326).

[0287] An antibody molecule can be one in which the variable region, or a portion thereof, e.g., the CDRs, are generated in a non-human organism, e.g., a rat or mouse. Chimeric, CDR-grafted, and humanized antibodies are within the invention. Antibody molecules generated in a non-human organism, e.g., a rat or mouse, and then modified, e.g., in the variable framework or constant region, to decrease antigenicity in a human are within the invention.

[0288] An “effectively human” protein is a protein that does substantially not evoke a neutralizing antibody response, e.g., the human anti-murine antibody (HAMA) response. HAMA can be problematic in a number of circumstances, e.g., if the antibody molecule is administered repeatedly, e.g., in treatment of a chronic or recurrent disease condition. A HAMA response can make repeated antibody administration potentially ineffective because of an increased antibody clearance from the serum (see, e.g., Saleh et al., Cancer Immunol. Immunother., 32:180-190 (1990)) and also because of potential allergic reactions (see, e.g., LoBuglio et al., Hybridoma, 5:5117-5123 (1986)).

[0289] Chimeric antibodies can be produced by recombinant DNA techniques known in the art (see Robinson et al., International Patent Publication PCT/US86/02269; Akira, et al., European Patent Application 184,187; Taniguchi, M., European Patent Application 171,496; Morrison et al., European Patent Application 173,494; Neuberger et al., International Application WO 86/01533; Cabilly et al. U.S. Pat. No. 4,816,567; Cabilly et al., European Patent Application 125,023; Better et al. (1988 Science 240:1041-1043); Liu et al. (1987) PNAS 84:3439-3443; Liu et al., 1987, J Immunol. 139:3521-3526; Sun et al. (1987) PNAS 84:214-218; Nishimura et al., 1987, Canc. Res. 47:999-1005; Wood et al. (1985) Nature 314:446-449; and Shaw et al., 1988, J. Natl Cancer Inst. 80:1553-1559).

[0290] A humanized or CDR-grafted antibody will have at least one or two but generally all three recipient CDRs (of heavy and or light immuoglobulin chains) replaced with a donor CDR. The antibody may be replaced with at least a portion of a non-human CDR or only some of the CDRs may be replaced with non-human CDRs. It is only necessary to replace the number of CDRs required for binding to the antigen. Preferably, the donor will be a rodent antibody, e.g., a rat or mouse antibody, and the recipient will be a human framework or a human consensus framework. Typically, the immunoglobulin providing the CDRs is called the “donor” and the immunoglobulin providing the framework is called the “acceptor.” In one embodiment, the donor immunoglobulin is a non-human (e.g., rodent). The acceptor framework is a naturally-occurring (e.g., a human) framework or a consensus framework, or a sequence about 85% or higher, preferably 90%, 95%, 99% or higher identical thereto.

[0291] As used herein, the term “consensus sequence” refers to the sequence formed from the most frequently occurring amino acids (or nucleotides) in a family of related sequences (See e.g., Winnaker, From Genes to Clones (Verlagsgesellschaft, Weinheim, Germany 1987). In a family of proteins, each position in the consensus sequence is occupied by the amino acid occurring most frequently at that position in the family. If two amino acids occur equally frequently, either can be included in the consensus sequence. A “consensus framework” refers to the framework region in the consensus immunoglobulin sequence.

[0292] An antibody molecule can be humanized by methods known in the art (see e.g., Morrison, S. L., 1985, Science 229:1202-1207, by Oi et al., 1986, BioTechniques 4:214, and by Queen et al. U.S. Pat. Nos. 5,585,089, 5,693,761 and 5,693,762, the contents of all of which are hereby incorporated by reference).

[0293] Humanized or CDR-grafted antibody molecules can be produced by CDR-grafting or CDR substitution, wherein one, two, or all CDRs of an immunoglobulin chain can be replaced. See e.g., U.S. Pat. No. 5,225,539; Jones et al. 1986 Nature 321:552-525; Verhoeyan et al. 1988 Science 239:1534; Beidler et al. 1988 J. Immunol. 141:4053-4060; Winter U.S. Pat. No. 5,225,539, the contents of all of which are hereby expressly incorporated by reference. Winter describes a CDR-grafting method which may be used to prepare the humanized antibodies of the present invention (UK Patent Application GB 2188638A, filed on Mar. 26, 1987; Winter U.S. Pat. No. 5,225,539), the contents of which is expressly incorporated by reference.

[0294] Also within the scope of the invention are humanized antibody molecules in which specific amino acids have been substituted, deleted or added. Criteria for selecting amino acids from the donor are described in U.S. Pat. No. 5,585,089, e.g., columns 12-16 of U.S. Pat. No. 5,585,089, e.g., columns 12-16 of U.S. Pat. No. 5,585,089, the contents of which are hereby incorporated by reference. Other techniques for humanizing antibodies are described in Padlan et al. EP 519596 A1, published on Dec. 23, 1992.

[0295] The antibody molecule can be a single chain antibody. A single-chain antibody (scFv) may be engineered (see, for example, Colcher, D. et al. (1999) Ann NY Acad Sci 880:263-80; and Reiter, Y. (1996) Clin Cancer Res 2:245-52). The single chain antibody can be dimerized or multimerized to generate multivalent antibodies having specificities for different epitopes of the same target protein.

[0296] In yet other embodiments, the antibody molecule has a heavy chain constant region chosen from, e.g., the heavy chain constant regions of IgG1, IgG2, IgG3, IgG4, IgM, IgA1, IgA2, IgD, and IgE; particularly, chosen from, e.g., the (e.g., human) heavy chain constant regions of IgG1, IgG2, IgG3, and IgG4. In another embodiment, the antibody molecule has a light chain constant region chosen from, e.g., the (e.g., human) light chain constant regions of kappa or lambda. The constant region can be altered, e.g., mutated, to modify the properties of the antibody (e.g., to increase or decrease one or more of: Fc receptor binding, antibody glycosylation, the number of cysteine residues, effector cell function, and/or complement function). In one embodiment the antibody has: effector function; and can fix complement. In other embodiments the antibody does not; recruit effector cells; or fix complement. In another embodiment, the antibody has reduced or no ability to bind an Fc receptor. For example, it is a isotype or subtype, fragment or other mutant, which does not support binding to an Fc receptor, e.g., it has a mutagenized or deleted Fc receptor binding region.

[0297] Methods for altering an antibody constant region are known in the art. Antibodies with altered function, e.g. altered affinity for an effector ligand, such as FcR on a cell, or the C1 component of complement can be produced by replacing at least one amino acid residue in the constant portion of the antibody with a different residue (see e.g., EP 388,151 A1, U.S. Pat. Nos. 5,624,821 and 5,648,260, the contents of all of which are hereby incorporated by reference). Similar type of alterations could be described which if applied to the murine, or other species immunoglobulin would reduce or eliminate these functions.

[0298] An antibody molecule can be derivatized or linked to another functional molecule (e.g., another peptide or protein). As used herein, a “derivatized” antibody molecule is one that has been modified. Methods of derivatization include but are not limited to the addition of a fluorescent moiety, a radionucleotide, a toxin, an enzyme or an affinity ligand such as biotin. Accordingly, the antibody molecules of the invention are intended to include derivatized and otherwise modified forms of the antibodies described herein, including immunoadhesion molecules. For example, an antibody molecule can be functionally linked (by chemical coupling, genetic fusion, noncovalent association or otherwise) to one or more other molecular entities, such as another antibody (e.g., a bispecific antibody or a diabody), a detectable agent, a cytotoxic agent, a pharmaceutical agent, and/or a protein or peptide that can mediate association of the antibody or antibody portion with another molecule (such as a streptavidin core region or a polyhistidine tag).

[0299] One type of derivatized antibody molecule is produced by crosslinking two or more antibodies (of the same type or of different types, e.g., to create bispecific antibodies). Suitable crosslinkers include those that are heterobifunctional, having two distinctly reactive groups separated by an appropriate spacer (e.g., m-maleimidobenzoyl-N-hydroxysuccinimide ester) or homobifunctional (e.g., disuccinimidyl suberate). Such linkers are available from Pierce Chemical Company, Rockford, Ill.

### Multispecific or Multifunctional Antibody Molecules

[0300] Exemplary structures of multispecific and multifunctional molecules defined herein are described throughout. Exemplary structures are further described in: Weidle U et al. (2013) The Intriguing Options of Multispecific Antibody Formats for Treatment of Cancer. Cancer Genomics & Proteomics 10: 1-18 (2013); and Spiess C et al. (2015) Alternative molecular formats and therapeutic applications for bispecific antibodies. Molecular Immunology 67: 95-106; the full contents of each of which is incorporated by reference herein).

[0301] In embodiments, multispecific antibody molecules can comprise more than one antigen-binding site, where different sites are specific for different antigens. In embodiments, multispecific antibody molecules can bind more than one (e.g., two or more) epitopes on the same antigen. In embodiments, multispecific antibody molecules comprise an antigen-binding site specific for a target cell (e.g., cancer cell) and a different antigen-binding site specific for an immune effector cell. In one embodiment, the multispecific antibody molecule is a bispecific antibody molecule. Bispecific antibody molecules can be classified into five different structural groups: (i) bispecific immunoglobulin G (BsIgG); (ii) IgG appended with an additional antigen-binding moiety; (iii) bispecific antibody fragments; (iv) bispecific fusion proteins; and (v) bispecific antibody conjugates.

[0302] BsIgG is a format that is monovalent for each antigen. Exemplary BsIgG formats include but are not limited to crossMab, DAF (two-in-one), DAF (four-in-one), DutaMab, DT-IgG, knobs-in-holes common LC, knobs-in-holes assembly, charge pair, Fab-arm exchange, SEEDbody, triomab, LUZ-Y, Fcab, κλ-body, orthogonal Fab. See Spiess et al. Mol. Immunol. 67(2015):95-106. Exemplary BsIgGs include catumaxomab (Fresenius Biotech, Trion Pharma, Neopharm), which contains an anti-CD3 arm and an anti-EpCAM arm; and ertumaxomab (Neovii Biotech, Fresenius Biotech), which targets CD3 and HER2. In some embodiments, BsIgG comprises heavy chains that are engineered for heterodimerization. For example, heavy chains can be engineered for heterodimerization using a “knobs-into-holes” strategy, a SEED platform, a common heavy chain (e.g., in κλ-bodies), and use of heterodimeric Fc regions. See Spiess et al. Mol. Immunol. 67(2015):95-106. Strategies that have been used to avoid heavy chain pairing of homodimers in BsIgG include knobs-in-holes, duobody, azymetric, charge pair, HA-TF, SEEDbody, and differential protein A affinity. See Id. BsIgG can be produced by separate expression of the component antibodies in different host cells and subsequent purification/assembly into a BsIgG. BsIgG can also be produced by expression of the component antibodies in a single host cell. BsIgG can be purified using affinity chromatography, e.g., using protein A and sequential pH elution.

[0303] IgG appended with an additional antigen-binding moiety is another format of bispecific antibody molecules. For example, monospecific IgG can be engineered to have bispecificity by appending an additional antigen-binding unit onto the monospecific IgG, e.g., at the N- or C-terminus of either the heavy or light chain. Exemplary additional antigen-binding units include single domain antibodies (e.g., variable heavy chain or variable light chain), engineered protein scaffolds, and paired antibody variable domains (e.g., single chain variable fragments or variable fragments). See Id. Examples of appended IgG formats include dual variable domain IgG (DVD-Ig), IgG(H)-scFv, scFv-(H)IgG, IgG(L)-scFv, scFv-(L)IgG, IgG(L,H)-Fv, IgG(H)-V, V(H)—IgG, IgG(L)-V, V(L)-IgG, KIH IgG-scFab, 2scFv-IgG, IgG-2scFv, scFv4-Ig, zybody, and DVI-IgG (four-in-one). See Spiess et al. Mol. Immunol. 67(2015):95-106. An example of an IgG-scFv is MM-141 (Merrimack Pharmaceuticals), which binds IGF-1R and HER3. Examples of DVD-Ig include ABT-981 (AbbVie), which binds IL-1α and IL-1β; and ABT-122 (AbbVie), which binds TNF and IL-17A.

[0304] Bispecific antibody fragments (BsAb) are a format of bispecific antibody molecules that lack some or all of the antibody constant domains. For example, some BsAb lack an Fc region. In embodiments, bispecific antibody fragments include heavy and light chain regions that are connected by a peptide linker that permits efficient expression of the BsAb in a single host cell. Exemplary bispecific antibody fragments include but are not limited to nanobody, nanobody-HAS, BiTE, Diabody, DART, TandAb, scDiabody, scDiabody-CH3, Diabody-CH3, triple body, miniantibody, minibody, TriBi minibody, scFv-CH3 KIH, Fab-scFv, scFv-CH-CL-scFv, F(ab′)2, F(ab′)2-scFv2, scFv-KIH, Fab-scFv-Fc, tetravalent HCAb, scDiabody-Fc, Diabody-Fc, tandem scFv-Fc, and intrabody. See Id. For example, the BiTE format comprises tandem scFvs, where the component scFvs bind to CD3 on T cells and a surface antigen on cancer cells

[0305] Bispecific fusion proteins include antibody fragments linked to other proteins, e.g., to add additional specificity and/or functionality. An example of a bispecific fusion protein is an immTAC, which comprises an anti-CD3 scFv linked to an affinity-matured T-cell receptor that recognizes HLA-presented peptides. In embodiments, the dock-and-lock (DNL) method can be used to generate bispecific antibody molecules with higher valency. Also, fusions to albumin binding proteins or human serum albumin can be extend the serum half-life of antibody fragments. See Id.

[0306] In embodiments, chemical conjugation, e.g., chemical conjugation of antibodies and/or antibody fragments, can be used to create BsAb molecules. See Id. An exemplary bispecific antibody conjugate includes the CovX-body format, in which a low molecular weight drug is conjugated site-specifically to a single reactive lysine in each Fab arm or an antibody or fragment thereof. In embodiments, the conjugation improves the serum half-life of the low molecular weight drug. An exemplary CovX-body is CVX-241 (NCT01004822), which comprises an antibody conjugated to two short peptides inhibiting either VEGF or Ang2. See Id.

[0307] The antibody molecules can be produced by recombinant expression, e.g., of at least one or more component, in a host system. Exemplary host systems include eukaryotic cells (e.g., mammalian cells, e.g., CHO cells, or insect cells, e.g., SF9 or S2 cells) and prokaryotic cells (e.g., E. coli). Bispecific antibody molecules can be produced by separate expression of the components in different host cells and subsequent purification/assembly. Alternatively, the antibody molecules can be produced by expression of the components in a single host cell. Purification of bispecific antibody molecules can be performed by various methods such as affinity chromatography, e.g., using protein A and sequential pH elution. In other embodiments, affinity tags can be used for purification, e.g., histidine-containing tag, myc tag, or streptavidin tag.

### CDR-Grafted Scaffolds

[0308] In embodiments, the antibody molecule is a CDR-grafted scaffold domain. In embodiments, the scaffold domain is based on a fibronectin domain, e.g., fibronectin type III domain. The overall fold of the fibronectin type III (Fn3) domain is closely related to that of the smallest functional antibody fragment, the variable domain of the antibody heavy chain. There are three loops at the end of Fn3; the positions of BC, DE and FG loops approximately correspond to those of CDR1, 2 and 3 of the VH domain of an antibody. Fn3 does not have disulfide bonds; and therefore Fn3 is stable under reducing conditions, unlike antibodies and their fragments (see, e.g., WO 98/56915; WO 01/64942; WO 00/34784). An Fn3 domain can be modified (e.g., using CDRs or hypervariable loops described herein) or varied, e.g., to select domains that bind to an antigen/marker/cell described herein.

[0309] In embodiments, a scaffold domain, e.g., a folded domain, is based on an antibody, e.g., a “minibody” scaffold created by deleting three beta strands from a heavy chain variable domain of a monoclonal antibody (see, e.g., Tramontano et al., 1994, J Mol. Recognit. 7:9; and Martin et al., 1994, EMBO J. 13:5303-5309). The “minibody” can be used to present two hypervariable loops. In embodiments, the scaffold domain is a V-like domain (see, e.g., Coia et al. WO 99/45110) or a domain derived from tendamistatin, which is a 74 residue, six-strand beta sheet sandwich held together by two disulfide bonds (see, e.g., McConnell and Hoess, 1995, J Mol. Biol. 250:460). For example, the loops of tendamistatin can be modified (e.g., using CDRs or hypervariable loops) or varied, e.g., to select domains that bind to a marker/antigen/cell described herein. Another exemplary scaffold domain is a beta-sandwich structure derived from the extracellular domain of CTLA-4 (see, e.g., WO 00/60070).

[0310] Other exemplary scaffold domains include but are not limited to T-cell receptors; MHC proteins; extracellular domains (e.g., fibronectin Type III repeats, EGF repeats); protease inhibitors (e.g., Kunitz domains, ecotin, BPTI, and so forth); TPR repeats; trifoil structures; zinc finger domains; DNA-binding proteins; particularly monomeric DNA binding proteins; RNA binding proteins; enzymes, e.g., proteases (particularly inactivated proteases), RNase; chaperones, e.g., thioredoxin, and heat shock proteins; and intracellular signaling domains (such as SH2 and SH3 domains). See, e.g., US 20040009530 and U.S. Pat. No. 7,501,121, incorporated herein by reference.

[0311] In embodiments, a scaffold domain is evaluated and chosen, e.g., by one or more of the following criteria: (1) amino acid sequence, (2) sequences of several homologous domains, (3) 3-dimensional structure, and/or (4) stability data over a range of pH, temperature, salinity, organic solvent, oxidant concentration. In embodiments, the scaffold domain is a small, stable protein domain, e.g., a protein of less than 100, 70, 50, 40 or 30 amino acids. The domain may include one or more disulfide bonds or may chelate a metal, e.g., zinc.

### Antibody-Based Fusions

[0312] A variety of formats can be generated which contain additional binding entities attached to the N or C terminus of antibodies. These fusions with single chain or disulfide stabilized Fvs or Fabs result in the generation of tetravalent molecules with bivalent binding specificity for each antigen. Combinations of scFvs and scFabs with IgGs enable the production of molecules which can recognize three or more different antigens.

### Antibody-Fab Fusion

[0313] Antibody-Fab fusions are bispecific antibodies comprising a traditional antibody to a first target and a Fab to a second target fused to the C terminus of the antibody heavy chain. Commonly the antibody and the Fab will have a common light chain. Antibody fusions can be produced by (1) engineering the DNA sequence of the target fusion, and (2) transfecting the target DNA into a suitable host cell to express the fusion protein. It seems like the antibody-scFv fusion may be linked by a (Gly)-Ser linker between the C-terminus of the CH3 domain and the N-terminus of the scFv, as described by Coloma, J. et al. (1997) Nature Biotech 15:159.

### Antibody-scFv Fusion

[0314] Antibody-scFv Fusions are bispecific antibodies comprising a traditional antibody and a scFv of unique specificity fused to the C terminus of the antibody heavy chain. The scFv can be fused to the C terminus through the Heavy Chain of the scFv either directly or through a linker peptide. Antibody fusions can be produced by (1) engineering the DNA sequence of the target fusion, and (2) transfecting the target DNA into a suitable host cell to express the fusion protein. It seems like the antibody-scFv fusion may be linked by a (Gly)-Ser linker between the C-terminus of the CH3 domain and the N-terminus of the scFv, as described by Coloma, J. et al. (1997) Nature Biotech 15:159.

### Variable Domain Immunoglobulin DVD

[0315] A related format is the dual variable domain immunoglobulin (DVD), which are composed of VH and VL domains of a second specificity place upon the N termini of the V domains by shorter linker sequences.

[0316] Other exemplary multispecific antibody formats include, e.g., those described in the following US20160114057A1, US20130243775A1, US20140051833, US20130022601, US20150017187A1, US20120201746A1, US20150133638A1, US20130266568A1, US20160145340A1, WO2015127158A1, US20150203591A1, US20140322221A1, US20130303396A1, US20110293613, US20130017200A1, US20160102135A1, WO2015197598A2, WO2015197582A1, U.S. Pat. No. 9,359,437, US20150018529, WO2016115274A1, WO2016087416A1, US20080069820A1, U.S. Pat. Nos. 9,145,588B, 7,919,257, and US20150232560A1. Exemplary multispecific molecules utilizing a full antibody-Fab/scFab format include those described in the following, U.S. Pat. No. 9,382,323B2, US20140072581A1, US20140308285A1, US20130165638A1, US20130267686A1, US20140377269A1, U.S. Pat. No. 7,741,446B2, and WO1995009917A1. Exemplary multispecific molecules utilizing a domain exchange format include those described in the following, US20150315296A1, WO2016087650A1, US20160075785A1, WO2016016299A1, US20160130347A1, US20150166670, U.S. Pat. No. 8,703,132B2, US20100316645, U.S. Pat. No. 8,227,577B2, US20130078249.

### Fc-Containing Entities (Mini-Antibodies)

[0317] Fc-containing entities, also known as mini-antibodies, can be generated by fusing scFv to the C-termini of constant heavy region domain 3 (CH3-scFv) and/or to the hinge region (scFv-hinge-Fc) of an antibody with a different specificity. Trivalent entities can also be made which have disulfide stabilized variable domains (without peptide linker) fused to the C-terminus of CH3 domains of IgGs.

### Fc-Containing Multispecific Molecules

[0318] In some embodiments, the multispecific molecules disclosed herein includes an immunoglobulin constant region (e.g., an Fc region). Exemplary Fc regions can be chosen from the heavy chain constant regions of IgG1, IgG2, IgG3 or IgG4; more particularly, the heavy chain constant region of human IgG1, IgG2, IgG3, or IgG4.

[0319] In some embodiments, the immunoglobulin chain constant region (e.g., the Fc region) is altered, e.g., mutated, to increase or decrease one or more of: Fc receptor binding, antibody glycosylation, the number of cysteine residues, effector cell function, or complement function.

[0320] In other embodiments, an interface of a first and second immunoglobulin chain constant regions (e.g., a first and a second Fc region) is altered, e.g., mutated, to increase or decrease dimerization, e.g., relative to a non-engineered interface, e.g., a naturally-occurring interface. For example, dimerization of the immunoglobulin chain constant region (e.g., the Fc region) can be enhanced by providing an Fc interface of a first and a second Fc region with one or more of: a paired protuberance-cavity (“knob-in-a hole”), an electrostatic interaction, or a strand-exchange, such that a greater ratio of heteromultimer to homomultimer forms, e.g., relative to a non-engineered interface.

[0321] In some embodiments, the multispecific molecules include a paired amino acid substitution at a position chosen from one or more of 347, 349, 350, 351, 366, 368, 370, 392, 394, 395, 397, 398, 399, 405, 407, or 409, e.g., of the Fc region of human IgG1 For example, the immunoglobulin chain constant region (e.g., Fc region) can include a paired an amino acid substitution chosen from: T366S, L368A, or Y407V (e.g., corresponding to a cavity or hole), and T366W (e.g., corresponding to a protuberance or knob).

[0322] In other embodiments, the multifunctional molecule includes a half-life extender, e.g., a human serum albumin or an antibody molecule to human serum albumin.

### Heterodimerized Antibody Molecules & Methods of Making

[0323] Various methods of producing multispecific antibodies have been disclosed to address the problem of incorrect heavy chain pairing. Exemplary methods are described below. Exemplary multispecific antibody formats and methods of making said multispecific antibodies are also disclosed in e.g., Speiss et al. Molecular Immunology 67 (2015) 95-106; and Klein et al mAbs 4:6, 653-663; November/December 2012; the entire contents of each of which are incorporated by reference herein.

[0324] Heterodimerized bispecific antibodies are based on the natural IgG structure, wherein the two binding arms recognize different antigens. IgG derived formats that enable defined monovalent (and simultaneous) antigen binding are generated by forced heavy chain heterodimerization, combined with technologies that minimize light chain mispairing (e.g., common light chain). Forced heavy chain heterodimerization can be obtained using, e.g., knob-in-hole OR strand exchange engineered domains (SEED).

[0325] Knob-in-Hole

[0326] Knob-in-Hole as described in U.S. Pat. Nos. 5,731,116, 7,476,724 and Ridgway, J. et al. (1996) Prot. Engineering 9(7): 617-621, broadly involves: (1) mutating the CH3 domain of one or both antibodies to promote heterodimerization; and (2) combining the mutated antibodies under conditions that promote heterodimerization. “Knobs” or “protuberances” are typically created by replacing a small amino acid in a parental antibody with a larger amino acid (e.g., T366Y or T366W); “Holes” or “cavities” are created by replacing a larger residue in a parental antibody with a smaller amino acid (e.g., Y407T, T366S, L368A and/or Y407V).

[0327] For bispecific antibodies including an Fc domain, introduction of specific mutations into the constant region of the heavy chains to promote the correct heterodimerization of the Fc portion can be utilized. Several such techniques are reviewed in Klein et al. (mAbs (2012) 4:6, 1-11), the contents of which are incorporated herein by reference in their entirety. These techniques include the “knobs-into-holes” (KiH) approach which involves the introduction of a bulky residue into one of the CH3 domains of one of the antibody heavy chains. This bulky residue fits into a complementary “hole” in the other CH3 domain of the paired heavy chain so as to promote correct pairing of heavy chains (see e.g., U.S. Pat. No. 7,642,228).

[0328] Exemplary KiH mutations include S354C, T366W in the “knob” heavy chain and Y349C, T366S, L368A, Y407V in the “hole” heavy chain. Other exemplary KiH mutations are provided in Table 1, with additional optional stabilizing Fc cysteine mutations.

TABLE 1
Exemplary Fc KiH mutations and optional Cysteine mutations

| Position | Knob Mutation | Hole Mutation |
|---|---|---|
| T366 | T366W | T366S |
| L368 | — | L368A |
| Y407 | — | Y407V |

Additional Cysteine Mutations to form a
stabilizing disulfide bridge

| Position | Knob CH3 | Hole CH3 |
|---|---|---|
| S354 | S354C | — |
| Y349 | — | Y349C |

[0329] Other Fc mutations are provided by Igawa and Tsunoda who identified 3 negatively charged residues in the CH3 domain of one chain that pair with three positively charged residues in the CH3 domain of the other chain. These specific charged residue pairs are: E356-K439, E357-K370, D399-K409 and vice versa. By introducing at least two of the following three mutations in chain A: E356K, E357K and D399K, as well as K370E, K409D, K439E in chain B, alone or in combination with newly identified disulfide bridges, they were able to favor very efficient heterodimerization while suppressing homodimerization at the same time (Martens T et al. A novel one-armed antic-Met antibody inhibits glioblastoma growth in vivo. Clin Cancer Res 2006; 12:6144-52; PMID:17062691). Xencor defined 41 variant pairs based on combining structural calculations and sequence information that were subsequently screened for maximal heterodimerization, defining the combination of S364H, F405A (HA) on chain A and Y349T, T394F on chain B (TF) (Moore G L et al. A novel bispecific antibody format enables simultaneous bivalent and monovalent co-engagement of distinct target antigens. MAbs 2011; 3:546-57; PMID: 22123055).

[0330] Other exemplary Fc mutations to promote heterodimerization of multispecific antibodies include those described in the following references, the contents of each of which is incorporated by reference herein, WO2016071377A1, US20140079689A1, US20160194389A1, US20160257763, WO2016071376A2, WO2015107026A1, WO2015107025A1, WO2015107015A1, US20150353636A1, US20140199294A1, U.S. Pat. No. 7,750,128B2, US20160229915A1, US20150344570A1, U.S. Pat. No. 8,003,774A1, US20150337049A1, US20150175707A1, US20140242075A1, US20130195849A1, US20120149876A1, US20140200331A1, U.S. Pat. No. 9,309,311B2, U.S. Pat. No. 8,586,713, US20140037621A1, US20130178605A1, US20140363426A1, US20140051835A1 and US20110054151A1.

[0331] Stabilizing cysteine mutations have also been used in combination with KiH and other Fc heterodimerization promoting variants, see e.g., U.S. Pat. No. 7,183,076. Other exemplary cysteine modifications include, e.g., those disclosed in US20140348839A1, U.S. Pat. No. 7,855,275B2, and U.S. Pat. No. 9,000,130B2.

[0332] Strand Exchange Engineered Domains (SEED)

[0333] Heterodimeric Fc platform that support the design of bispecific and asymmetric fusion proteins by devising strand-exchange engineered domain (SEED) C(H)3 heterodimers are known. These derivatives of human IgG and IgA C(H)3 domains create complementary human SEED C(H)3 heterodimers that are composed of alternating segments of human IgA and IgG C(H)3 sequences. The resulting pair of SEED C(H)3 domains preferentially associates to form heterodimers when expressed in mammalian cells. SEEDbody (Sb) fusion proteins consist of [IgG1 hinge]-C(H)2-[SEED C(H)3], that may be genetically linked to one or more fusion partners (see e.g., Davis J H et al. SEEDbodies: fusion proteins based on strand exchange engineered domain (SEED) CH3 heterodimers in an Fc analogue platform for asymmetric binders or immunofusions and bispecific antibodies. Protein Eng Des Sel 2010; 23:195-202; PMID:20299542 and U.S. Pat. No. 8,871,912. The contents of each of which are incorporated by reference herein).

[0334] Duobody

[0335] “Duobody” technology to produce bispecific antibodies with correct heavy chain pairing are known. The DuoBody technology involves three basic steps to generate stable bispecific human IgG1 antibodies in a post-production exchange reaction. In a first step, two IgG1s, each containing single matched mutations in the third constant (CH3) domain, are produced separately using standard mammalian recombinant cell lines. Subsequently, these IgG1 antibodies are purified according to standard processes for recovery and purification. After production and purification (post-production), the two antibodies are recombined under tailored laboratory conditions resulting in a bispecific antibody product with a very high yield (typically >95%) (see e.g., Labrijn et al, PNAS 2013; 110(13):5145-5150 and Labrijn et al. Nature Protocols 2014; 9(10):2450-63, the contents of each of which are incorporated by reference herein).

[0336] Electrostatic Interactions

[0337] Methods of making multispecific antibodies using CH3 amino acid changes with charged amino acids such that homodimer formation is electrostatically unfavorable are disclosed. EP1870459 and WO 2009089004 describe other strategies for favoring heterodimer formation upon co-expression of different antibody domains in a host cell. In these methods, one or more residues that make up the heavy chain constant domain 3 (CH3), CH3-CH3 interfaces in both CH3 domains are replaced with a charged amino acid such that homodimer formation is electrostatically unfavorable and heterodimerization is electrostatically favorable. Additional methods of making multispecific molecules using electrostatic interactions are described in the following references, the contents of each of which is incorporated by reference herein, include US20100015133, U.S. Pat. No. 8,592,562B2, U.S. Pat. No. 9,200,060B2, US20140154254A1, and U.S. Pat. No. 9,358,286A1.

[0338] Common Light Chain

[0339] Light chain mispairing needs to be avoided to generate homogenous preparations of bispecific IgGs. One way to achieve this is through the use of the common light chain principle, i.e. combining two binders that share one light chain but still have separate specificities. An exemplary method of enhancing the formation of a desired bispecific antibody from a mixture of monomers is by providing a common variable light chain to interact with each of the heteromeric variable heavy chain regions of the bispecific antibody. Compositions and methods of producing bispecific antibodies with a common light chain as disclosed in, e.g., U.S. Pat. No. 7,183,076B2, US20110177073A1, EP2847231A1, WO2016079081A1, and EP3055329A1, the contents of each of which is incorporated by reference herein.

[0340] CrossMab

[0341] Another option to reduce light chain mispairing is the CrossMab technology which avoids non-specific L chain mispairing by exchanging CH1 and CL domains in the Fab of one half of the bispecific antibody. Such crossover variants retain binding specificity and affinity, but make the two arms so different that L chain mispairing is prevented. The CrossMab technology (as reviewed in Klein et al. Supra) involves domain swapping between heavy and light chains so as to promote the formation of the correct pairings. Briefly, to construct a bispecific IgG-like CrossMab antibody that could bind to two antigens by using two distinct light chain-heavy chain pairs, a two-step modification process is applied. First, a dimerization interface is engineered into the C-terminus of each heavy chain using a heterodimerization approach, e.g., Knob-into-hole (KiH) technology, to ensure that only a heterodimer of two distinct heavy chains from one antibody (e.g., Antibody A) and a second antibody (e.g., Antibody B) is efficiently formed. Next, the constant heavy 1 (CH1) and constant light (CL) domains of one antibody are exchanged (Antibody A), keeping the variable heavy (VH) and variable light (VL) domains consistent. The exchange of the CH1 and CL domains ensured that the modified antibody (Antibody A) light chain would only efficiently dimerize with the modified antibody (antibody A) heavy chain, while the unmodified antibody (Antibody B) light chain would only efficiently dimerize with the unmodified antibody (Antibody B) heavy chain; and thus only the desired bispecific CrossMab would be efficiently formed (see e.g., Cain, C. SciBX 4(28); doi:10.1038/scibx.2011.783, the contents of which are incorporated by reference herein).

[0342] Common Heavy Chain

[0343] An exemplary method of enhancing the formation of a desired bispecific antibody from a mixture of monomers is by providing a common variable heavy chain to interact with each of the heteromeric variable light chain regions of the bispecific antibody. Compositions and methods of producing bispecific antibodies with a common heavy chain are disclosed in, e.g., US20120184716, US20130317200, and US20160264685A1, the contents of each of which is incorporated by reference herein.

[0344] Amino Acid Modifications

[0345] Alternative compositions and methods of producing multispecific antibodies with correct light chain pairing include various amino acid modifications. For example, Zymeworks describes heterodimers with one or more amino acid modifications in the CH1 and/or CL domains, one or more amino acid modifications in the VH and/or VL domains, or a combination thereof, which are part of the interface between the light chain and heavy chain and create preferential pairing between each heavy chain and a desired light chain such that when the two heavy chains and two light chains of the heterodimer pair are co-expressed in a cell, the heavy chain of the first heterodimer preferentially pairs with one of the light chains rather than the other (see e.g., WO2015181805). Other exemplary methods are described in WO2016026943 (Argen-X), US20150211001, US20140072581A1, US20160039947A1, and US20150368352.

[0346] Lambda/Kappa Formats

[0347] Multispecific molecules (e.g., multispecific antibody molecules) that include the lambda light chain polypeptide and a kappa light chain polypeptides, can be used to allow for heterodimerization. Methods for generating bispecific antibody molecules comprising the lambda light chain polypeptide and a kappa light chain polypeptides are disclosed in PCT/US17/53053 filed on Sep. 22, 2017, incorporated herein by reference in its entirety.

[0348] In embodiments, the multispecific molecules includes a multispecific antibody molecule, e.g., an antibody molecule comprising two binding specificities, e.g., a bispecific antibody molecule. The multispecific antibody molecule includes:

[0349] a lambda light chain polypeptide 1 (LLCP1) specific for a first epitope;

[0350] a heavy chain polypeptide 1 (HCP1) specific for the first epitope;

[0351] a kappa light chain polypeptide 2 (KLCP2) specific for a second epitope; and

[0352] a heavy chain polypeptide 2 (HCP2) specific for the second epitope.

[0353] “Lambda light chain polypeptide 1 (LLCP1)”, as that term is used herein, refers to a polypeptide comprising sufficient light chain (LC) sequence, such that when combined with a cognate heavy chain variable region, can mediate specific binding to its epitope and complex with an HCP1. In an embodiment it comprises all or a fragment of a CH1 region. In an embodiment, an LLCP1 comprises LC-CDR1, LC-CDR2, LC-CDR3, FR1, FR2, FR3, FR4, and CH1, or sufficient sequence therefrom to mediate specific binding of its epitope and complex with an HCP1. LLCP1, together with its HCP1, provide specificity for a first epitope (while KLCP2, together with its HCP2, provide specificity for a second epitope). As described elsewhere herein, LLCP1 has a higher affinity for HCP1 than for HCP2.

[0354] “Kappa light chain polypeptide 2 (KLCP2)”, as that term is used herein, refers to a polypeptide comprising sufficient light chain (LC) sequence, such that when combined with a cognate heavy chain variable region, can mediate specific binding to its epitope and complex with an HCP2. In an embodiments it comprises all or a fragment of a CH1 region. In an embodiment, a KLCP2 comprises LC-CDR1, LC-CDR2, LC-CDR3, FR1, FR2, FR3, FR4, and CH1, or sufficient sequence therefrom to mediate specific binding of its epitope and complex with an HCP2. KLCP2, together with its HCP2, provide specificity for a second epitope (while LLCP1, together with its HCP1, provide specificity for a first epitope).

[0355] “Heavy chain polypeptide 1 (HCP1)”, as that term is used herein, refers to a polypeptide comprising sufficient heavy chain (HC) sequence, e.g., HC variable region sequence, such that when combined with a cognate LLCP1, can mediate specific binding to its epitope and complex with an HCP1. In an embodiments it comprises all or a fragment of a CH1 region. In an embodiment, it comprises all or a fragment of a CH2 and/or CH3 region. In an embodiment an HCP1 comprises HC-CDR1, HC-CDR2, HC-CDR3, FR1, FR2, FR3, FR4, CH1, CH2, and CH3, or sufficient sequence therefrom to: (i) mediate specific binding of its epitope and complex with an LLCP1, (ii) to complex preferentially, as described herein to LLCP1 as opposed to KLCP2; and (iii) to complex preferentially, as described herein, to an HCP2, as opposed to another molecule of HCP1. HCP1, together with its LLCP1, provide specificity for a first epitope (while KLCP2, together with its HCP2, provide specificity for a second epitope).

[0356] “Heavy chain polypeptide 2 (HCP2)”, as that term is used herein, refers to a polypeptide comprising sufficient heavy chain (HC) sequence, e.g., HC variable region sequence, such that when combined with a cognate LLCP1, can mediate specific binding to its epitope and complex with an HCP1. In an embodiments it comprises all or a fragment of a CH1 region. In an embodiments it comprises all or a fragment of a CH2 and/or CH3 region. In an embodiment an HCP1 comprises HC-CDR1, HC-CDR2, HC-CDR3, FR1, FR2, FR3, FR4, CH1, CH2, and CH3, or sufficient sequence therefrom to: (i) mediate specific binding of its epitope and complex with an KLCP2, (ii) to complex preferentially, as described herein to KLCP2 as opposed to LLCP1; and (iii) to complex preferentially, as described herein, to an HCP1, as opposed to another molecule of HCP2. HCP2, together with its KLCP2, provide specificity for a second epitope (while LLCP1, together with its HCP1, provide specificity for a first epitope).

[0357] In some embodiments of the multispecific antibody molecule disclosed herein:

[0358] LLCP1 has a higher affinity for HCP1 than for HCP2; and/or

[0359] KLCP2 has a higher affinity for HCP2 than for HCP1.

[0360] In embodiments, the affinity of LLCP1 for HCP1 is sufficiently greater than its affinity for HCP2, such that under preselected conditions, e.g., in aqueous buffer, e.g., at pH 7, in saline, e.g., at pH 7, or under physiological conditions, at least 75, 80, 90, 95, 98, 99, 99.5, or 99.9% of the multispecific antibody molecule molecules have a LLCP1 complexed, or interfaced with, a HCP1.

[0361] In some embodiments of the multispecific antibody molecule disclosed herein:

[0362] the HCP1 has a greater affinity for HCP2, than for a second molecule of HCP1; and/or

[0363] the HCP2 has a greater affinity for HCP1, than for a second molecule of HCP2.

[0364] In embodiments, the affinity of HCP1 for HCP2 is sufficiently greater than its affinity for a second molecule of HCP1, such that under preselected conditions, e.g., in aqueous buffer, e.g., at pH 7, in saline, e.g., at pH 7, or under physiological conditions, at least 75%, 80, 90, 95, 98, 99 99.5 or 99.9% of the multispecific antibody molecule molecules have a HCP1 complexed, or interfaced with, a HCP2.

[0365] In another aspect, disclosed herein is a method for making, or producing, a multispecific antibody molecule. The method includes:

(i) providing a first heavy chain polypeptide (e.g., a heavy chain polypeptide comprising one, two, three or all of a first heavy chain variable region (first VH), a first CH1, a first heavy chain constant region (e.g., a first CH2, a first CH3, or both));
(ii) providing a second heavy chain polypeptide (e.g., a heavy chain polypeptide comprising one, two, three or all of a second heavy chain variable region (second VH), a second CH1, a second heavy chain constant region (e.g., a second CH2, a second CH3, or both));
(iii) providing a lambda chain polypeptide (e.g., a lambda light variable region (VLλ), a lambda light constant chain (VLλ), or both) that preferentially associates with the first heavy chain polypeptide (e.g., the first VH); and
(iv) providing a kappa chain polypeptide (e.g., a lambda light variable region (VLκ), a lambda light constant chain (VLκ), or both) that preferentially associates with the second heavy chain polypeptide (e.g., the second VH),
under conditions where (i)-(iv) associate.

[0366] In embodiments, the first and second heavy chain polypeptides form an Fc interface that enhances heterodimerization.

[0367] In embodiments, (i)-(iv) (e.g., nucleic acid encoding (i)-(iv)) are introduced in a single cell, e.g., a single mammalian cell, e.g., a CHO cell. In embodiments, (i)-(iv) are expressed in the cell.

[0368] In embodiments, (i)-(iv) (e.g., nucleic acid encoding (i)-(iv)) are introduced in different cells, e.g., different mammalian cells, e.g., two or more CHO cell. In embodiments, (i)-(iv) are expressed in the cells.

[0369] In one embodiment, the method further comprises purifying a cell-expressed antibody molecule, e.g., using a lambda- and/or-kappa-specific purification, e.g., affinity chromatography.

[0370] In embodiments, the method further comprises evaluating the cell-expressed multispecific antibody molecule. For example, the purified cell-expressed multispecific antibody molecule can be analyzed by techniques known in the art, include mass spectrometry. In one embodiment, the purified cell-expressed antibody molecule is cleaved, e.g., digested with papain to yield the Fab moieties and evaluated using mass spectrometry.

[0371] In embodiments, the method produces correctly paired kappa/lambda multispecific, e.g., bispecific, antibody molecules in a high yield, e.g., at least 75%, 80, 90, 95, 98, 99 99.5 or 99.9%.

[0372] In other embodiments, the multispecific, e.g., a bispecific, antibody molecule that includes:

(i) a first heavy chain polypeptide (HCP1) (e.g., a heavy chain polypeptide comprising one, two, three or all of a first heavy chain variable region (first VH), a first CH1, a first heavy chain constant region (e.g., a first CH2, a first CH3, or both)), e.g., wherein the HCP1 binds to a first epitope;
(ii) a second heavy chain polypeptide (HCP2) (e.g., a heavy chain polypeptide comprising one, two, three or all of a second heavy chain variable region (second VH), a second CH1, a second heavy chain constant region (e.g., a second CH2, a second CH3, or both)), e.g., wherein the HCP2 binds to a second epitope;
(iii) a lambda light chain polypeptide (LLCP1) (e.g., a lambda light variable region (VLl), a lambda light constant chain (VLl), or both) that preferentially associates with the first heavy chain polypeptide (e.g., the first VH), e.g., wherein the LLCP1 binds to a first epitope; and (iv) a kappa light chain polypeptide (KLCP2) (e.g., a lambda light variable region (VLk), a lambda light constant chain (VLk), or both) that preferentially associates with the second heavy chain polypeptide (e.g., the second VH), e.g., wherein the KLCP2 binds to a second epitope.

[0373] In embodiments, the first and second heavy chain polypeptides form an Fc interface that enhances heterodimerization. In embodiments, the multispecific antibody molecule has a first binding specificity that includes a hybrid VLl-CLl heterodimerized to a first heavy chain variable region connected to the Fc constant, CH2-CH3 domain (having a knob modification) and a second binding specificity that includes a hybrid VLk-CLk heterodimerized to a second heavy chain variable region connected to the Fc constant, CH2-CH3 domain (having a hole modification).

### Linkers

[0374] The multispecific or multifunctional molecule disclosed herein can further include a linker, e.g., a linker between one or more of: the antigen binding domain and the cytokine molecule, the antigen binding domain and the immune cell engager, the antigen binding domain and the stromal modifying moiety, the cytokine molecule and the immune cell engager, the cytokine molecule and the stromal modifying moiety, the immune cell engager and the stromal modifying moiety, the antigen binding domain and the immunoglobulin chain constant region, the cytokine molecule and the immunoglobulin chain constant region, the immune cell engager and the immunoglobulin chain constant region, or the stromal modifying moiety and the immunoglobulin chain constant region. In embodiments, the linker is chosen from: a cleavable linker, a non-cleavable linker, a peptide linker, a flexible linker, a rigid linker, a helical linker, or a non-helical linker, or a combination thereof.

[0375] In one embodiment, the multispecific molecule can include one, two, three or four linkers, e.g., a peptide linker. In one embodiment, the peptide linker includes Gly and Ser. In some embodiments, the peptide linker is selected from GGGGS (SEQ ID NO: 42); GGGGSGGGGS (SEQ ID NO: 43); GGGGSGGGGSGGGGS (SEQ ID NO: 44); and DVPSGPGGGGGSGGGGS (SEQ ID NO: 45). In some embodiments, the peptide linker is a A(EAAAK)nA (SEQ ID NO: 6154) family of linkers (e.g., as described in Protein Eng. (2001) 14 (8): 529-532). These are stiff helical linkers with n ranging from 2-5. In some embodiments, the peptide linker is selected from AEAAAKEAAAKAAA (SEQ ID NO: 75); AEAAAKEAAAKEAAAKAAA (SEQ ID NO: 76); AEAAAKEAAAKEAAAKEAAAKAAA (SEQ ID NO: 77); and AEAAAKEAAAKEAAAKEAAAKEAAAKAAA(SEQ ID NO: 78).

### Targeting Moieties

[0376] In one embodiment, the anti-NKp30 antibody molecule further comprises a second antigen binding moiety, e.g., tumor targeting moiety, that binds to a cancer antigen, e.g., a tumor antigen or a stromal antigen. In some embodiments, the cancer antigen is, e.g., a mammalian, e.g., a human, cancer antigen. In other embodiments, the antibody molecule further comprises a second binding moiety that binds to an immune cell antigen, e.g., a mammalian, e.g., a human, immune cell antigen. In other embodiments, the antibody molecule further comprises a second binding moiety that binds to a viral antigen. For example, the antibody molecule binds specifically to an epitope, e.g., linear or conformational epitope, on the cancer antigen, the immune cell antigen.

[0377] In some embodiments, the multispecific (e.g., bi-, tri-, tetra-specific) molecule, includes, e.g., is engineered to contain, one or more tumor specific targeting moieties that direct the molecule to a tumor cell. In certain embodiments, the multispecific molecules disclosed herein include a tumor-targeting moiety. The tumor targeting moiety can be chosen from an antibody molecule (e.g., an antigen binding domain as described herein), a receptor or a receptor fragment, or a ligand or a ligand fragment, or a combination thereof. In some embodiments, the tumor targeting moiety associates with, e.g., binds to, a tumor cell (e.g., a molecule, e.g., antigen, present on the surface of the tumor cell). In certain embodiments, the tumor targeting moiety targets, e.g., directs the multispecific molecules disclosed herein to a cancer (e.g., a cancer or tumor cells). In some embodiments, the cancer is chosen from a hematological cancer, a solid cancer, a metastatic cancer, or a combination thereof.

[0378] In some embodiments, the multispecific molecule, e.g., the tumor-targeting moiety, binds to a solid tumor antigen or a stromal antigen. The solid tumor antigen or stromal antigen can be present on a solid tumor, or a metastatic lesion thereof. In some embodiments, the solid tumor is chosen from one or more of pancreatic (e.g., pancreatic adenocarcinoma), breast, colorectal, lung (e.g., small or non-small cell lung cancer), skin, ovarian, or liver cancer. In one embodiment, the solid tumor is a fibrotic or desmoplastic solid tumor. For example, the solid tumor antigen or stromal antigen can be present on a tumor, e.g., a tumor of a class typified by having one or more of: limited tumor perfusion, compressed blood vessels, or fibrotic tumor interstitium.

[0379] In certain embodiments, the solid tumor antigen is chosen from one or more of: PDL1, CD47, mesothelin, ganglioside 2 (GD2), prostate stem cell antigen (PSCA), prostate specific membrane antigen (PMSA), prostate-specific antigen (PSA), carcinoembryonic antigen (CEA), Ron Kinase, c-Met, Immature laminin receptor, TAG-72, BING-4, Calcium-activated chloride channel 2, Cyclin-B1, 9D7, Ep-CAM, EphA3, Her2/neu, Telomerase, SAP-1, Survivin, NY-ESO-1/LAGE-1, PRAME, SSX-2, Melan-A/MART-1, Gp100/pmel17, Tyrosinase, TRP-1/-2, MC1R, β-catenin, BRCA1/2, CDK4, CML66, Fibronectin, p53, Ras, TGF-B receptor, AFP, ETA, MAGE, MUC-1, CA-125, BAGE, GAGE, NY-ESO-1, β-catenin, CDK4, CDC27, CD47, a actinin-4, TRP1/gp75, TRP2, gp100, Melan-A/MART1, gangliosides, WT1, EphA3, Epidermal growth factor receptor (EGFR), CD20, MART-2, MART-1, MUC1, MUC2, MUM1, MUM2, MUM3, NA88-1, NPM, OA1, OGT, RCC, RUI1, RUI2, SAGE, TRG, TRP1, TSTA, Folate receptor alpha, L1-CAM, CAIX, EGFRvIII, gpA33, GD3, GM2, VEGFR, Intergrins (Integrin alphaVbeta3, Integrin alpha5Beta1), Carbohydrates (Le), IGF1R, EPHA3, TRAILR1, TRAILR2, or RANKL. In some embodiments, the solid tumor antigen is chosen from: PDL1, Mesothelin, CD47, GD2, PMSA, PSCA, CEA, Ron Kinase, or c-Met. Exemplary amino acid and nucleotide sequences for tumor targeting moieties are disclosed in WO 2017/165464, see e.g., pages 102-108, 172-290, incorporated herein by reference.

[0380] In some embodiments, the anti-NKp30 antibody molecule (e.g., the multispecific antibody molecule) further comprises a targeting moiety, e.g., a binding specificity, that binds to an autoreactive T cell, e.g., an antigen present on the surface of an autoreactive T cell that is associated with the inflammatory or autoimmune disorder.

[0381] In some embodiments, the anti-NKp30 antibody molecule (e.g., the multispecific antibody molecule) further comprises a targeting moiety, e.g., a binding specificity, that binds to an infected cell, e.g., a viral infected cell.

### T Cell Engagers

[0382] In other embodiments, the anti-NKp30 antibody molecule (e.g., the multispecific antibody molecule) further comprises one or more T cell engager that mediate binding to and/or activation of a T cell. Accordingly, in some embodiments, the T cell engager is selected from an antigen binding domain or ligand that binds to (e.g., and in some embodiments activates) one or more of CD3, TCRα, TCRβ, TCRγ, TCRζ, ICOS, CD28, CD27, HVEM, LIGHT, CD40, 4-1BB, OX40, DR3, GITR, CD30, TIMI, SLAM, CD2, or CD226. In other embodiments, the T cell engager is selected from an antigen binding domain or ligand that binds to and does not activate one or more of CD3, TCRα, TCRβ, TCRγ, TCRζ, ICOS, CD28, CD27, HVEM, LIGHT, CD40, 4-1BB, OX40, DR3, GITR, CD30, TIMI, SLAM, CD2, or CD226.

[0383] Exemplary T cell engagers are disclosed in WO 2017/165464, incorporated herein by reference.

### Cytokine Molecules

[0384] In other embodiments, the anti-NKp30 antibody molecule (e.g., the multispecific antibody molecule) further comprises one or more cytokine molecules, e.g., immunomodulatory (e.g., proinflammatory) cytokines and variants, e.g., functional variants, thereof. Accordingly, in some embodiments, the cytokine molecule is an interleukin or a variant, e.g., a functional variant thereof. In some embodiments the interleukin is a proinflammatory interleukin. In some embodiments the interleukin is chosen from interleukin-2 (IL-2), interleukin-12 (IL-12), interleukin-15 (IL-15), interleukin-18 (IL-18), interleukin-21 (IL-21), interleukin-7 (IL-7), or interferon gamma. In some embodiments, the cytokine molecule is a proinflammatory cytokine.

[0385] In certain embodiments, the cytokine is a single chain cytokine. In certain embodiments, the cytokine is a multichain cytokine (e.g., the cytokine comprises 2 or more (e.g., 2) polypeptide chains. An exemplary multichain cytokine is IL-12.

[0386] Examples of useful cytokines include, but are not limited to, GM-CSF, IL-1α, IL-1β, IL-2, IL-3, IL-4, IL-5, IL-6, IL-7, IL-8, IL-10, IL-12, IL-21, IFN-α, IFN-γ, MIP-1α, MIP-1β, TGF-β, TNF-α, and TNFβ. In one embodiment the cytokine of the multispecific or multifunctional polypeptide is a cytokine selected from the group of GM-CSF, IL-2, IL-7, IL-8, IL-10, IL-12, IL-15, IL-21, IFN-α, IFN-γ, MIP-1α, MIP-1β and TGF-β. In one embodiment the cytokine of the i the multispecific or multifunctional polypeptide is a cytokine selected from the group of IL-2, IL-7, IL-10, IL-12, IL-15, IFN-α, and IFN-γ. In certain embodiments the cytokine is mutated to remove N- and/or O-glycosylation sites. Elimination of glycosylation increases homogeneity of the product obtainable in recombinant production.

[0387] In one embodiment, the cytokine of the multispecific or multifunctional polypeptide is IL-2. In a specific embodiment, the IL-2 cytokine can elicit one or more of the cellular responses selected from the group consisting of: proliferation in an activated T lymphocyte cell, differentiation in an activated T lymphocyte cell, cytotoxic T cell (CTL) activity, proliferation in an activated B cell, differentiation in an activated B cell, proliferation in a natural killer (NK) cell, differentiation in a NK cell, cytokine secretion by an activated T cell or an NK cell, and NK/lymphocyte activated killer (LAK) antitumor cytotoxicity. In another particular embodiment the IL-2 cytokine is a mutant IL-2 cytokine having reduced binding affinity to the .alpha.-subunit of the IL-2 receptor. Together with the beta- and gamma-subunits (also known as CD122 and CD132, respectively), the .alpha.-subunit (also known as CD25) forms the heterotrimeric high-affinity IL-2 receptor, while the dimeric receptor consisting only of the β- and γ-subunits is termed the intermediate-affinity IL-2 receptor. As described in PCT patent application number PCT/EP2012/051991, which is incorporated herein by reference in its entirety, a mutant IL-2 polypeptide with reduced binding to the .alpha.-subunit of the IL-2 receptor has a reduced ability to induce IL-2 signaling in regulatory T cells, induces less activation-induced cell death (AICD) in T cells, and has a reduced toxicity profile in vivo, compared to a wild-type IL-2 polypeptide. The use of such an cytokine with reduced toxicity is particularly advantageous in a multispecific or multifunctional polypeptide according to the invention, having a long serum half-life due to the presence of an Fc domain. In one embodiment, the mutant IL-2 cytokine of the multispecific or multifunctional polypeptide according to the invention comprises at least one amino acid mutation that reduces or abolishes the affinity of the mutant IL-2 cytokine to the .alpha.-subunit of the IL-2 receptor (CD25) but preserves the affinity of the mutant IL-2 cytokine to the intermediate-affinity IL-2 receptor (consisting of the β and γ subunits of the IL-2 receptor), compared to the non-mutated IL-2 cytokine. In one embodiment the one or more amino acid mutations are amino acid substitutions. In a specific embodiment, the mutant IL-2 cytokine comprises one, two or three amino acid substitutions at one, two or three position(s) selected from the positions corresponding to residue 42, 45, and 72 of human IL-2. In a more specific embodiment, the mutant IL-2 cytokine comprises three amino acid substitutions at the positions corresponding to residue 42, 45 and 72 of human IL-2. In an even more specific embodiment, the mutant IL-2 cytokine is human IL-2 comprising the amino acid substitutions F42A, Y45A and L72G. In one embodiment the mutant IL-2 cytokine additionally comprises an amino acid mutation at a position corresponding to position 3 of human IL-2, which eliminates the 0-glycosylation site of IL-2. Particularly, said additional amino acid mutation is an amino acid substitution replacing a threonine residue by an alanine residue. A particular mutant IL-2 cytokine useful in the invention comprises four amino acid substitutions at positions corresponding to residues 3, 42, 45 and 72 of human IL-2. Specific amino acid substitutions are T3A, F42A, Y45A and L72G. As demonstrated in PCT patent application number PCT/EP2012/051991 and in the appended Examples, said quadruple mutant IL-2 polypeptide (IL-2 qm) exhibits no detectable binding to CD25, reduced ability to induce apoptosis in T cells, reduced ability to induce IL-2 signaling in T.sub.reg cells, and a reduced toxicity profile in vivo. However, it retains ability to activate IL-2 signaling in effector cells, to induce proliferation of effector cells, and to generate IFN-γ as a secondary cytokine by NK cells.

[0388] The IL-2 or mutant IL-2 cytokine according to any of the above embodiments may comprise additional mutations that provide further advantages such as increased expression or stability. For example, the cysteine at position 125 may be replaced with a neutral amino acid such as alanine, to avoid the formation of disulfide-bridged IL-2 dimers. Thus, in certain embodiments the IL-2 or mutant IL-2 cytokine of the multispecific or multifunctional polypeptide according to the invention comprises an additional amino acid mutation at a position corresponding to residue 125 of human IL-2. In one embodiment said additional amino acid mutation is the amino acid substitution C125A.

[0389] Exemplary cytokine molecules are disclosed in WO 2017/165464, see e.g., pages 108-118, 169-172, incorporated herein by reference.

### TGF-β Inhibitor

[0390] In other embodiments, the anti-NKp30 antibody molecule (e.g., the multispecific antibody molecule) further comprises one or more modulators of TGF-β (e.g., a TGF-β inhibitor). In some embodiments, the TGF-β inhibitor binds to and inhibits TGF-β, e.g., reduces the activity of TGF-β. In some embodiments, the TGF-β inhibitor inhibits (e.g., reduces the activity of) TGF-β1. In some embodiments, the TGF-β inhibitor inhibits (e.g., reduces the activity of) TGF-β2. In some embodiments, the TGF-β inhibitor inhibits (e.g., reduces the activity of) TGF-β3. In some embodiments, the TGF-β inhibitor inhibits (e.g., reduces the activity of) TGF-β1 and TGF-β3. In some embodiments, the TGF-β inhibitor inhibits (e.g., reduces the activity of) TGF-β1, TGF-β2, and TGF-β3.

[0391] In some embodiments, the TGF-β inhibitor comprises a portion of a TGF-β receptor (e.g., an extracellular domain of a TGF-β receptor) that is capable of inhibiting (e.g., reducing the activity of) TGF-β, or functional fragment or variant thereof. In some embodiments, the TGF-β inhibitor comprises a TGFBR1 polypeptide (e.g., an extracellular domain of TGFBR1 or functional variant thereof). In some embodiments, the TGF-β inhibitor comprises a TGFBR2 polypeptide (e.g., an extracellular domain of TGFBR2 or functional variant thereof). In some embodiments, the TGF-β inhibitor comprises a TGFBR3 polypeptide (e.g., an extracellular domain of TGFBR3 or functional variant thereof). In some embodiments, the TGF-β inhibitor comprises a TGFBR1 polypeptide (e.g., an extracellular domain of TGFBR1 or functional variant thereof) and a TGFBR2 polypeptide (e.g., an extracellular domain of TGFBR2 or functional variant thereof). In some embodiments, the TGF-β inhibitor comprises a TGFBR1 polypeptide (e.g., an extracellular domain of TGFBR1 or functional variant thereof) and a TGFBR3 polypeptide (e.g., an extracellular domain of TGFBR3 or functional variant thereof). In some embodiments, the TGF-β inhibitor comprises a TGFBR2 polypeptide (e.g., an extracellular domain of TGFBR2 or functional variant thereof) and a TGFBR3 polypeptide (e.g., an extracellular domain of TGFBR3 or functional variant thereof).

[0392] Exemplary TGF-β receptor polypeptides that can be used as TGF-β inhibitors have been disclosed in U.S. Pat. Nos. 8,993,524, 9,676,863, 8,658,135, US20150056199, US20070184052, and WO2017037634, all of which are herein incorporated by reference in their entirety.

[0393] In some embodiments, the TGF-β inhibitor comprises an extracellular domain of TGFBR1 or a sequence substantially identical thereto (e.g., a sequence that is at least 80%, 85%, 90%, or 95% identical thereto). In some embodiments, the TGF-β inhibitor comprises an extracellular domain of SEQ ID NO: 3095, or a sequence substantially identical thereto (e.g., a sequence that is at least 80%, 85%, 90%, or 95% identical thereto). In some embodiments, the TGF-β inhibitor comprises an extracellular domain of SEQ ID NO: 3096, or a sequence substantially identical thereto (e.g., a sequence that is at least 80%, 85%, 90%, or 95% identical thereto). In some embodiments, the TGF-β inhibitor comprises an extracellular domain of SEQ ID NO: 3097, or a sequence substantially identical thereto (e.g., a sequence that is at least 80%, 85%, 90%, or 95% identical thereto). In some embodiments, the TGF-β inhibitor comprises the amino acid sequence of SEQ ID NO: 3104, or a sequence substantially identical thereto (e.g., a sequence that is at least 80%, 85%, 90%, or 95% identical thereto). In some embodiments, the TGF-β inhibitor comprises the amino acid sequence of SEQ ID NO: 3105, or a sequence substantially identical thereto (e.g., a sequence that is at least 80%, 85%, 90%, or 95% identical thereto).

[0394] In some embodiments, the TGF-β inhibitor comprises an extracellular domain of TGFBR2 or a sequence substantially identical thereto (e.g., a sequence that is at least 80%, 85%, 90%, or 95% identical thereto). In some embodiments, the TGF-β inhibitor comprises an extracellular domain of SEQ ID NO: 3098, or a sequence substantially identical thereto (e.g., a sequence that is at least 80%, 85%, 90%, or 95% identical thereto). In some embodiments, the TGF-β inhibitor comprises an extracellular domain of SEQ ID NO: 3099, or a sequence substantially identical thereto (e.g., a sequence that is at least 80%, 85%, 90%, or 95% identical thereto). In some embodiments, the TGF-β inhibitor comprises the amino acid sequence of SEQ ID NO: 3100, or a sequence substantially identical thereto (e.g., a sequence that is at least 80%, 85%, 90%, or 95% identical thereto). In some embodiments, the TGF-β inhibitor comprises the amino acid sequence of SEQ ID NO: 3101, or a sequence substantially identical thereto (e.g., a sequence that is at least 80%, 85%, 90%, or 95% identical thereto). In some embodiments, the TGF-β inhibitor comprises the amino acid sequence of SEQ ID NO: 3102, or a sequence substantially identical thereto (e.g., a sequence that is at least 80%, 85%, 90%, or 95% identical thereto). In some embodiments, the TGF-β inhibitor comprises the amino acid sequence of SEQ ID NO: 3103, or a sequence substantially identical thereto (e.g., a sequence that is at least 80%, 85%, 90%, or 95% identical thereto).

[0395] In some embodiments, the TGF-β inhibitor comprises an extracellular domain of TGFBR3 or a sequence substantially identical thereto (e.g., a sequence that is at least 80%, 85%, 90%, or 95% identical thereto). In some embodiments, the TGF-β inhibitor comprises an extracellular domain of SEQ ID NO: 3106, or a sequence substantially identical thereto (e.g., a sequence that is at least 80%, 85%, 90%, or 95% identical thereto). In some embodiments, the TGF-β inhibitor comprises an extracellular domain of SEQ ID NO: 3107, or a sequence substantially identical thereto (e.g., a sequence that is at least 80%, 85%, 90%, or 95% identical thereto). In some embodiments, the TGF-β inhibitor comprises the amino acid sequence of SEQ ID NO: 3108, or a sequence substantially identical thereto (e.g., a sequence that is at least 80%, 85%, 90%, or 95% identical thereto).

[0396] In some embodiments, the TGF-β inhibitor comprises no more than one TGF-β receptor extracellular domain. In some embodiments, the TGF-β inhibitor comprises two or more (e.g., two, three, four, five, or more) TGF-β receptor extracellular domains, linked together, e.g., via a linker.

TABLE 4
Exemplary amino acid sequences of TGF-β polypeptides
or TGF-β receptor polypeptides

| SEQ | | |
|---|---|---|
| ID NO | Description | Amino acid sequence |
| SEQ | Immature | MPPSGLRLLLLLLPLLWLLVLTPGRPAAGLSTCKTIDMELVKRKRIE |
| ID NO: | human TGF-β | AIRGQILSKLRLASPPSQGEVPPGPLPEAVLALYNSTRDRVAGESAE |
| 3092 | 1 (P01137-1) | PEPEPEADYYAKEVTRVLMVETHNEIYDKFKQSTHSIYMFFNTSELR |
| | | EAVPEPVLLSRAELRLLRLKLKVEQHVELYQKYSNNSWRYLSNRLLA |
| | | PSDSPEWLSFDVTGVVRQWLSRGGEIEGFRLSAHCSCDSRDNTLQVD |
| | | INGFTTGRRGDLATIHGMNRPFLLLMATPLERAQHLQSSRHRRALDT |
| | | NYCFSSTEKNCCVRQLYIDFRKDLGWKWIHEPKGYHANFCLGPCPYI |
| | | WSLDTQYSKVLALYNQHNPGASAAPCCVPQALEPLPIVYYVGRKPKV |
| | | EQLSNMIVRSCKCS |
| SEQ | Human TGF-β | LSTCKTIDMELVKRKRIEAIRGQILSKLRLASPPSQGEVPPGPLPEA |
| ID NO: | 1 (P01137-1) | VLALYNSTRDRVAGESAEPEPEPEADYYAKEVTRVLMVETHNEIYDK |
| 3117 | | FKQSTHSIYMFFNTSELREAVPEPVLLSRAELRLLRLKLKVEQHVEL |
| | | YQKYSNNSWRYLSNRLLAPSDSPEWLSFDVTGVVRQWLSRGGEIEGF |
| | | RLSAHCSCDSRDNTLQVDINGFTTGRRGDLATIHGMNRPFLLLMATP |
| | | LERAQHLQSSRHRRALDTNYCFSSTEKNCCVRQLYIDFRKDLGWKWI |
| | | HEPKGYHANFCLGPCPYIWSLDTQYSKVLALYNQHNPGASAAPCCVP |
| | | QALEPLPIVYYVGRKPKVEQLSNMIVRSCKCS |
| SEQ | Immature | MHYCVLSAFLILHLVTVALSLSTCSTLDMDQFMRKRIEAIRGQILSK |
| ID NO: | human TGF-β | LKLTSPPEDYPEPEEVPPEVISIYNSTRDLLQEKASRRAAACERERS |
| 3093 | 2 (P61812-1) | DEEYYAKEVYKIDMPPFFPSENAIPPTFYRPYFRIVRFDVSAMEKNA |
| | | SNLVKAEFRVFRLQNPKARVPEQRIELYQILKSKDLTSPTQRYIDSK |
| | | VVKTRAEGEWLSFDVTDAVHEWLHHKDRNLGFKISLHCPCCTFVPSN |
| | | NYIIPNKSEELEARFAGIDGTSTYTSGDQKTIKSTRKKNSGKTPHLL |
| | | LMLLPSYRLESQQTNRRKKRALDAAYCFRNVQDNCCLRPLYIDFKRD |
| | | LGWKWIHEPKGYNANFCAGACPYLWSSDTQHSRVLSLYNTINPEASA |
| | | SPCCVSQDLEPLTILYYIGKTPKIEQLSNMIVKSCKCS |
| SEQ | Human TGF-β | LSTCSTLDMDQFMRKRIEAIRGQILSKLKLTSPPEDYPEPEEVPPEV |
| ID NO: | 2 (P61812-1) | ISIYNSTRDLLQEKASRRAAACERERSDEEYYAKEVYKIDMPPFFPS |
| 3118 | | ENAIPPTFYRPYFRIVRFDVSAMEKNASNLVKAEFRVFRLQNPKARV |
| | | PEQRIELYQILKSKDLTSPTQRYIDSKVVKTRAEGEWLSFDVTDAVH |
| | | EWLHHKDRNLGFKISLHCPCCTFVPSNNYIIPNKSEELEARFAGIDG |
| | | TSTYTSGDQKTIKSTRKKNSGKTPHLLLMLLPSYRLESQQTNRRKKR |
| | | ALDAAYCFRNVQDNCCLRPLYIDFKRDLGWKWIHEPKGYNANFCAGA |
| | | CPYLWSSDTQHSRVLSLYNTINPEASASPCCVSQDLEPLTILYYIGK |
| | | TPKIEQLSNMIVKSCKCS |
| SEQ | Immature | MKMHLQRALVVLALLNFATVSLSLSTCTTLDFGHIKKKRVEAIRGQI |
| ID NO: | human TGF-β | LSKLRLTSPPEPTVMTHVPYQVLALYNSTRELLEEMHGEREEGCTQE |
| 3094 | 3 (P10600-1) | NTESEYYAKEIHKFDMIQGLAEHNELAVCPKGITSKVFRFNVSSVEK |
| | | NRTNLFRAEFRVLRVPNPSSKRNEQRIELFQILRPDEHIAKQRYIGG |
| | | KNLPTRGTAEWLSFDVTDTVREWLLRRESNLGLEISIHCPCHTFQPN |
| | | GDILENIHEVMEIKFKGVDNEDDHGRGDLGRLKKQKDHHNPHLILMM |
| | | IPPHRLDNPGQGGQRKKRALDTNYCFRNLEENCCVRPLYIDFRQDLG |
| | | WKWVHEPKGYYANFCSGPCPYLRSADTTHSTVLGLYNTLNPEASASP |
| | | CCVPQDLEPLTILYYVGRTPKVEQLSNMVVKSCKCS |
| SEQ | Human TGF-β | LSTCTTLDFGHIKKKRVEAIRGQILSKLRLTSPPEPTVMTHVPYQVL |
| ID NO: | 3 (P10600-1) | ALYNSTRELLEEMHGEREEGCTQENTESEYYAKEIHKFDMIQGLAEH |
| 3119 | | NELAVCPKGITSKVFRFNVSSVEKNRTNLFRAEFRVLRVPNPSSKRN |
| | | EQRIELFQILRPDEHIAKQRYIGGKNLPTRGTAEWLSFDVTDTVREW |
| | | LLRRESNLGLEISIHCPCHTFQPNGDILENIHEVMEIKFKGVDNEDD |
| | | HGRGDLGRLKKQKDFIHNPHLILMMIPPHRLDNPGQGGQRKKRALDT |
| | | NYCFRNLEENCCVRPLYIDFRQDLGWKWVHEPKGYYANFCSGPCPYL |
| | | RSADTTHSTVLGLYNTLNPEASASPCCVPQDLEPLTILYYVGRTPKV |
| | | EQLSNMVVKSCKCS |
| SEQ | Immature | MEAAVAAPRPRLLLLVLAAAAAAAAALLPGATALQCFCHLCTKDNFT |
| ID NO: | human | CVTDGLCFVSVTETTDKVIHNSMCIAEIDLIPRDRPFVCAPSSKTGS |
| 3095 | TGFBR1 | VTTTYCCNQDHCNKIELPTTVKSSPGLGPVELAAVIAGPVCFVCISL |
| | isoform 1 | MLMVYICHNRTVIFIHRVPNEEDPSLDRPFISEGTTLKDLIYDMTTS |
| | (P36897-1) | GSGSGLPLLVQRTIARTIVLQESIGKGRFGEVWRGKWRGEEVAVKIF |
| | | SSREERSWFREAEIYQTVMLRHENILGFIAADNKDNGTWTQLWLVSD |
| | | YHEHGSLFDYLNRYTVTVEGMIKLALSTASGLAHLHMEIVGTQGKPA |
| | | IAHRDLKSKNILVKKNGTCCIADLGLAVRHDSATDTIDIAPNHRVGT |
| | | KRYMAPEVLDDSINMKHFESFKRADIYAMGLVFWEIARRCSIGGIHE |
| | | DYQLPYYDLVPSDPSVEEMRKVVCEQKLRPNIPNRWQSCEALRVMAK |
| | | IMRECWYANGAARLTALRIKKTLSQLSQQEGIKM |
| SEQ | Human | LQCFCHLCTKDNFTCVTDGLCFVSVTETTDKVIHNSMCIAEIDLIPR |
| ID NO: | TGFBR1 | DRPFVCAPSSKTGSVTTTYCCNQDHCNKIELPTTVKSSPGLGPVELA |
| 3120 | isoform 1 | AVIAGPVCFVCISLMLMVYICHNRTVIHHRVPNEEDPSLDRPFISEG |
| | (P36897-1) | TTLKDLIYDMTTSGSGSGLPLLVQRTIARTIVLQESIGKGRFGEVWR |
| | | GKWRGEEVAVKIFSSREERSWFREAEIYQTVMLRHENILGFIAADNK |
| | | DNGTWTQLWLVSDYHEHGSLFDYLNRYTVTVEGMIKLALSTASGLAH |
| | | LHMEIVGTQGKPAIAHRDLKSKNILVKKNGTCCIADLGLAVRHDSAT |
| | | DTIDIAPNHRVGTKRYMAPEVLDDSINMKHFESFKRADIYAMGLVFW |
| | | EIARRCSIGGIHEDYQLPYYDLVPSDPSVEEMRKVVCEQKLRPNIPN |
| | | RWQSCEALRVMAKIMRECWYANGAARLTALRIKKTLSQLSQQEGIKM |
| SEQ | Immature | MEAAVAAPRPRLLLLVLAAAAAAAAALLPGATALQCFCHLCTKDNFT |
| ID NO: | human | CVTDGLCFVSVTETTDKVIHNSMCIAEIDLIPRDRPFVCAPSSKTGS |
| 3096 | TGFBR1 | VTTTYCCNQDHCNKIELPTTGPFSVKSSPGLGPVELAAVIAGPVCFV |
| | isoform 2 | CISLMLMVYICHNRTVIFIHRVPNEEDPSLDRPFISEGTTLKDLIYD |
| | (P36897-2) | MTTSGSGSGLPLLVQRTIARTIVLQESIGKGRFGEVWRGKWRGEEVA |
| | | VKIFSSREERSWFREAEIYQTVMLRHENILGFIAADNKDNGTWTQLW |
| | | LVSDYHEHGSLFDYLNRYTVTVEGMIKLALSTASGLAHLHMEIVGTQ |
| | | GKPAIAHRDLKSKNILVKKNGTCCIADLGLAVRHDSATDTIDIAPNH |
| | | RVGTKRYMAPEVLDDSINMKHFESFKRADIYAMGLVFWEIARRCSIG |
| | | GIHEDYQLPYYDLVPSDPSVEEMRKVVCEQKLRPNIPNRWQSCEALR |
| | | VMAKIMRECWYANGAARLTALRIKKTLSQLSQQEGIKM |
| SEQ | Human | LQCFCHLCTKDNFTCVTDGLCFVSVTETTDKVIHNSMCIAEIDLIPR |
| ID NO: | TGFBR1 | DRPFVCAPSSKTGSVTTTYCCNQDHCNKIELPTTGPFSVKSSPGLGP |
| 3121 | isoform 2 | VELAAVIAGPVCFVCISLMLMVYICHNRTVIFIHRVPNEEDPSLDRP |
| | (P36897-2) | FISEGTTLKDLIYDMTTSGSGSGLPLLVQRTIARTIVLQESIGKGRF |
| | | GEVWRGKWRGEEVAVKIFSSREERSWFREAEIYQTVMLRHENILGFI |
| | | AADNKDNGTWTQLWLVSDYHEHGSLFDYLNRYTVTVEGMIKLALSTA |
| | | SGLAHLHMEIVGTQGKPAIAHRDLKSKNILVKKNGTCCIADLGLAVR |
| | | HDSATDTIDIAPNHRVGTKRYMAPEVLDDSINMKHFESFKRADIYAM |
| | | GLVFWEIARRCSIGGIHEDYQLPYYDLVPSDPSVEEMRKVVCEQKLR |
| | | PNIPNRWQSCEALRVMAKIMRECWYANGAARLTALRIKKTLSQLSQQ |
| | | EGIKM |
| SEQ | Immature | MEAAVAAPRPRLLLLVLAAAAAAAAALLPGATALQCFCHLCTKDNFT |
| ID NO: | human | CVTDGLCFVSVTETTDKVIHNSMCIAEIDLIPRDRPFVCAPSSKTGS |
| 3097 | TGFBR1 | VTTTYCCNQDHCNKIELPTTGLPLLVQRTIARTIVLQESIGKGRFGE |
| | isoform 3 | VWRGKWRGEEVAVKIFSSREERSWFREAEIYQTVMLRHENILGFIAA |
| | (P36897-3) | DNKDNGTWTQLWLVSDYHEHGSLFDYLNRYTVTVEGMIKLALSTASG |
| | | LAHLHMEIVGTQGKPAIAHRDLKSKNILVKKNGTCCIADLGLAVRHD |
| | | SATDTIDIAPNHRVGTKRYMAPEVLDDSINMKHFESFKRADIYAMGL |
| | | VFWEIARRCSIGGIHEDYQLPYYDLVPSDPSVEEMRKVVCEQKLRPN |
| | | IPNRWQSCEALRVMAKIMRECWYANGAARLTALRIKKTLSQLSQQEG |
| | | IKM |
| SEQ | Human | LQCFCHLCTKDNFTCVTDGLCFVSVTETTDKVIHNSMCIAEIDLIPR |
| ID NO: | TGFBR1 | DRPFVCAPSSKTGSVTTTYCCNQDHCNKIELPTTGLPLLVQRTIART |
| 3122 | isoform 3 | IVLQESIGKGRFGEVWRGKWRGEEVAVKIFSSREERSWFREAEIYQT |
| | (P36897-3) | VMLRHENILGFIAADNKDNGTWTQLWLVSDYHEHGSLFDYLNRYTVT |
| | | VEGMIKLALSTASGLAHLHMEIVGTQGKPAIAHRDLKSKNILVKKNG |
| | | TCCIADLGLAVRHDSATDTIDIAPNHRVGTKRYMAPEVLDDSINMKH |
| | | FESFKRADIYAMGLVFWEIARRCSIGGIHEDYQLPYYDLVPSDPSVE |
| | | EMRKVVCEQKLRPNIPNRWQSCEALRVMAKIMRECWYANGAARLTAL |
| | | RIKKTLSQLSQQEGIKM |
| SEQ | Human | LQCFCHLCTKDNFTCVTDGLCFVSVTETTDKVIHNSMCIAEIDLIPR |
| ID NO: | TGFBR1 | DRPFVCAPSSKTGSVTTTYCCNQDHCNKIELPTTVKSSPGLGPVEL |
| 3104 | fragment 1 | |
| SEQ | Human | ALQCFCHLCTKDNFTCVTDGLCFVSVTETTDKVIHNSMCIAEIDLIP |
| ID NO: | TGFBR1 | RDRPFVCAPSSKTGSVTTTYCCNQDHCNKIEL |
| 3105 | fragment 2 | |
| SEQ | Immature | MGRGLLRGLWPLHIVLWTRIASTIPPHVQKSVNNDMIVTDNNGAVKF |
| ID NO: | human | PQLCKFCDVRFSTCDNQKSCMSNCSITSICEKPQEVCVAVWRKNDEN |
| 3098 | TGFBR2 | ITLETVCHDPKLPYHDFILEDAASPKCIMKEKKKPGETFFMCSCSSD |
| | isoform B | ECNDNIIFSEEYNTSNPDLLLVIFQVTGISLLPPLGVAISVIIIFYC |
| | (short | YRVNRQQKLSSTWETGKTRKLMEFSEHCAIILEDDRSDISSTCANNI |
| | isoform) | NHNTELLPIELDTLVGKGRFAEVYKAKLKQNTSEQFETVAVKIFPYE |
| | (P37173-1) | EYASWKTEKDIFSDINLKHENILQFLTAEERKTELGKQYWLITAFHA |
| | | KGNLQEYLTRHVISWEDLRKLGSSLARGIAHLHSDHTPCGRPKMPIV |
| | | HRDLKSSNILVKNDLTCCLCDFGLSLRLDPTLSVDDLANSGQVGTAR |
| | | YMAPEVLESRMNLENVESFKQTDVYSMALVLWEMTSRCNAVGEVKDY |
| | | EPPFGSKVREHPCVESMKDNVLRDRGRPEIPSFWLNHQGIQMVCETL |
| | | TECWDHDPEARLTAQCVAERFSELEHLDRLSGRSCSEEKIPEDGSLN |
| | | TTK |
| SEQ | Human | TIPPHVQKSVNNDMIVTDNNGAVKFPQLCKFCDVRFSTCDNQKSCMS |
| ID NO: | TGFBR2 | NCSITSICEKPQEVCVAVWRKNDENITLETVCHDPKLPYHDFILEDA |
| 3123 | isoform B | ASPKCIMKEKKKPGETFFMCSCSSDECNDNIIFSEEYNTSNPDLLLV |
| | (short | IFQVTGISLLPPLGVAISVIIIFYCYRVNRQQKLSSTWETGKTRKLM |
| | isoform) | EFSEHCAIILEDDRSDISSTCANNINHNTELLPIELDTLVGKGRFAE |
| | (P37173-1) | VYKAKLKQNTSEQFETVAVKIFPYEEYASWKTEKDIFSDINLKHENI |
| | | LQFLTAEERKTELGKQYWLITAFHAKGNLQEYLTRHVISWEDLRKLG |
| | | SSLARGIAHLHSDHTPCGRPKMPIVHRDLKSSNILVKNDLTCCLCDF |
| | | GLSLRLDPTLSVDDLANSGQVGTARYMAPEVLESRMNLENVESFKQT |
| | | DVYSMALVLWEMTSRCNAVGEVKDYEPPFGSKVREHPCVESMKDNVL |
| | | RDRGRPEIPSFWLNHQGIQMVCETLTECWDHDPEARLTAQCVAERFS |
| | | ELEHLDRLSGRSCSEEKIPEDGSLNTTK |
| SEQ | Immature | MGRGLLRGLWPLHIVLWTRIASTIPPHVQKSDVEMEAQKDEIICPSC |
| ID NO: | human | NRTAHPLRHINNDMIVTDNNGAVKFPQLCKFCDVRFSTCDNQKSCMS |
| 3099 | TGFBR2 | NCSITSICEKPQEVCVAVWRKNDENITLETVCHDPKLPYHDFILEDA |
| | isoform A | ASPKCIMKEKKKPGETFFMCSCSSDECNDNIIFSEEYNTSNPDLLLV |
| | (long isoform) | IFQVTGISLLPPLGVAISVIIIFYCYRVNRQQKLSSTWETGKTRKLM |
| | (P37173-2) | EFSEHCAIILEDDRSDISSTCANNINHNTELLPIELDTLVGKGRFAE |
| | | VYKAKLKQNTSEQFETVAVKIFPYEEYASWKTEKDIFSDINLKHENI |
| | | LQFLTAEERKTELGKQYWLITAFHAKGNLQEYLTRHVISWEDLRKLG |
| | | SSLARGIAHLHSDHTPCGRPKMPIVHRDLKSSNILVKNDLTCCLCDF |
| | | GLSLRLDPTLSVDDLANSGQVGTARYMAPEVLESRMNLENVESFKQT |
| | | DVYSMALVLWEMTSRCNAVGEVKDYEPPFGSKVREHPCVESMKDNVL |
| | | RDRGRPEIPSFWLNHQGIQMVCETLTECWDHDPEARLTAQCVAERFS |
| | | ELEHLDRLSGRSCSEEKIPEDGSLNTTK |
| SEQ | Human | TIPPHVQKSDVEMEAQKDEIICPSCNRTAHPLRHINNDMIVTDNNGA |
| ID NO: | TGFBR2 | VKFPQLCKFCDVRFSTCDNQKSCMSNCSITSICEKPQEVCVAVWRKN |
| 3124 | isoform A | DENITLETVCHDPKLPYHDFILEDAASPKCIMKEKKKPGETFFMCSC |
| | (long isoform) | SSDECNDNIIFSEEYNTSNPDLLLVIFQVTGISLLPPLGVAISVIII |
| | (P37173-2) | FYCYRVNRQQKLSSTWETGKTRKLMEFSEHCAIILEDDRSDISSTCA |
| | | NNINHNTELLPIELDTLVGKGRFAEVYKAKLKQNTSEQFETVAVKIF |
| | | PYEEYASWKTEKDIFSDINLKHENILQFLTAEERKTELGKQYWLITA |
| | | FHAKGNLQEYLTRHVISWEDLRKLGSSLARGIAHLHSDHTPCGRPKM |
| | | PIVHRDLKSSNILVKNDLTCCLCDFGLSLRLDPTLSVDDLANSGQVG |
| | | TARYMAPEVLESRMNLENVESFKQTDVYSMALVLWEMTSRCNAVGEV |
| | | KDYEPPFGSKVREHPCVESMKDNVLRDRGRPEIPSFWLNHQGIQMVC |
| | | ETLTECWDHDPEARLTAQCVAERFSELEHLDRLSGRSCSEEKIPEDG |
| | | SLNTTK |
| SEQ | Human | TIPPHVQKSVNNDMIVTDNNGAVKFPQLCKFCDVRFSTCDNQKSCMS |
| ID NO: | TGFBR2 | NCSITSICEKPQEVCVAVWRKNDENITLETVCHDPKLPYHDFILEDA |
| 3100 | fragment 1 | ASPKCIMKEKKKPGETFFMCSCSSDECNDNIIFSEEYNTSNPD |
| | (ECD of | |
| | human | |
| | TGFBR2 | |
| | isoform B) | |
| SEQ | Human | IPPHVQKSVNNDMIVTDNNGAVKFPQLCKFCDVRFSTCDNQKSCMSN |
| ID NO: | TGFBR2 | CSITSICEKPQEVCVAVWRKNDENITLETVCHDPKLPYHDFILEDAA |
| 3101 | fragment 2 | SPKCIMKEKKKPGETFFMCSCSSDECNDNIIFSEEYNTSNPD |
| SEQ | Human | TIPPHVQKSDVEMEAQKDEIICPSCNRTAHPLRHINNDMIVTDNNGA |
| ID NO: | TGFBR2 | VKFPQLCKFCDVRFSTCDNQKSCMSNCSITSICEKPQEVCVAVWRKN |
| 3102 | fragment 3 | DENITLETVCHDPKLPYHDFILEDAASPKCIMKEKKKPGETFFMCSC |
| | (ECD of | SSDECNDNIIFSEEYNTSNPD |
| | human | |
| | TGFBR2 | |
| | isoform A) | |
| SEQ | Human | QLCKFCDVRFSTCDNQKSCMSNCSITSICEKPQEVCVAVWRKNDENI |
| ID NO: | TGFBR2 | TLETVCHDPKLPYHDFILEDAASPKCIMKEKKKPGETFFMCSCSSDE |
| 3103 | fragment 4 | CNDNIIF |
| SEQ | Immature | MTSHYVIAIFALMSSCLATAGPEPGALCELSPVSASHPVQALMESFT |
| ID NO: | human | VLSGCASRGTTGLPQEVHVLNLRTAGQGPGQLQREVTLHLNPISSV |
| 3106 | TGFBR3 | HIHHKSVVFLLNSPHPLVWHLKTERLATGVSRLFLVSEGSVVQFSSA |
| | isoform 1 | NFSLTAETEERNFPHGNEHLLNWARKEYGAVTSFTELKIARNIYIKV |
| | (Q03167-1) | GEDQVFPPKCNIGKNFLSLNYLAEYLQPKAAEGCVMSSQPQNEEVHI |
| | | IELITPNSNPYSAFQVDITIDIRPSQEDLEVVKNLILILKCKKSVNW |
| | | VIKSFDVKGSLKIIAPNSIGFGKESERSMTMTKSIRDDIPSTQGNLV |
| | | KWALDNGYSPITSYTMAPVANRFHLRLENNAEEMGDEEVHTIPPELR |
| | | ILLDPGALPALQNPPIRGGEGQNGGLPFPFPDISRRVWNEEGEDGLP |
| | | RPKDPVIPSIQLFPGLREPEEVQGSVDIALSVKCDNEKMIVAVEKDS |
| | | FQASGYSGMDVTLLDPTCKAKMNGTHFVLESPLNGCGTRPRWSALDG |
| | | VVYYNSIVIQVPALGDSSGWPDGYEDLESGDNGFPGDMDEGDASLFT |
| | | RPEIVVFNCSLQQVRNPSSFQEQPHGNITFNMELYNTDLFLVPSQGV |
| | | FSVPENGHVYVEVSVTKAEQELGFAIQTCFISPYSNPDRMSHYTIIE |
| | | NICPKDESVKFYSPKRVHFPIPQADMDKKRFSFVFKPVFNTSLLFLQ |
| | | CELTLCTKMEKHPQKLPKCVPPDEACTSLDASIIWAMMQNKKTFTKP |
| | | LAVIHHEAESKEKGPSMKEPNPISPPIFHGLDTLTVMGIAFAAFVIG |
| | | ALLTGALWYIYSHTGETAGRQQVPTSPPASENSSAAHSIGSTQSTPC |
| | | SSSSTA |
| SEQ | Human | GPEPGALCELSPVSASHPVQALMESFTVLSGCASRGTTGLPQEVHVL |
| ID NO: | TGFBR3 | NLRTAGQGPGQLQREVTLHLNPISSVHIFIHKSVVFLLNSPHPLVWH |
| 3125 | isoform 1 | LKTERLATGVSRLFLVSEGSVVQFSSANFSLTAETEERNFPHGNEHL |
| | (Q03167-1) | LNWARKEYGAVTSFTELKIARNIYIKVGEDQVFPPKCNIGKNFLSLN |
| | | YLAEYLQPKAAEGCVMSSQPQNEEVHIIELITPNSNPYSAFQVDITI |
| | | DIRPSQEDLEVVKNLILILKCKKSVNWVIKSFDVKGSLKIIAPNSIG |
| | | FGKESERSMTMTKSIRDDIPSTQGNLVKWALDNGYSPITSYTMAPVA |
| | | NRFHLRLENNAEEMGDEEVHTIPPELRILLDPGALPALQNPPIRGGE |
| | | GQNGGLPFPFPDISRRVWNEEGEDGLPRPKDPVIPSIQLFPGLREPE |
| | | EVQGSVDIALSVKCDNEKMIVAVEKDSFQASGYSGMDVTLLDPTCKA |
| | | KMNGTHFVLESPLNGCGTRPRWSALDGVVYYNSIVIQVPALGDSSGW |
| | | PDGYEDLESGDNGFPGDMDEGDASLFTRPEIVVFNCSLQQVRNPSSF |
| | | QEQPHGNITFNMELYNTDLFLVPSQGVFSVPENGHVYVEVSVTKAEQ |
| | | ELGFAIQTCFISPYSNPDRMSHYTIIENICPKDESVKFYSPKRVHFP |
| | | IPQADMDKKRFSFVFKPVFNTSLLFLQCELTLCTKMEKHPQKLPKCV |
| | | PPDEACTSLDASIIWAMMQNKKTFTKPLAVIHHEAESKEKGPSMKEP |
| | | NPISPPIFHGLDTLTVMGIAFAAFVIGALLTGALWYIYSHTGETAGR |
| | | QQVPTSPPASENSSAAHSIGSTQSTPCSSSSTA |
| SEQ | Immature | MTSHYVIAIFALMSSCLATAGPEPGALCELSPVSASHPVQALMESFT |
| ID NO: | human | VLSGCASRGTTGLPQEVHVLNLRTAGQGPGQLQREVTLHLNPISSVH |
| 3107 | TGFBR3 | IHHKSVVFLLNSPHPLVWHLKTERLATGVSRLFLVSEGSVVQFSSAN |
| | isoform 2 | FSLTAETEERNFPHGNEHLLNWARKEYGAVTSFTELKIARNIYIKVG |
| | (Q03167-2) | EDQVFPPKCNIGKNFLSLNYLAEYLQPKAAEGCVMSSQPQNEEVHII |
| | | ELITPNSNPYSAFQVDITIDIRPSQEDLEVVKNLILILKCKKSVNWV |
| | | IKSFDVKGSLKIIAPNSIGFGKESERSMTMTKSIRDDIPSTQGNLVK |
| | | WALDNGYSPITSYTMAPVANRFHLRLENNEEMGDEEVHTIPPELRIL |
| | | LDPGALPALQNPPIRGGEGQNGGLPFPFPDISRRVWNEEGEDGLPRP |
| | | KDPVIPSIQLFPGLREPEEVQGSVDIALSVKCDNEKMIVAVEKDSFQ |
| | | ASGYSGMDVTLLDPTCKAKMNGTHFVLESPLNGCGTRPRWSALDGVV |
| | | YYNSIVIQVPALGDSSGWPDGYEDLESGDNGFPGDMDEGDASLFTRP |
| | | EIVVFNCSLQQVRNPSSFQEQPHGNITFNMELYNTDLFLVPSQGVFS |
| | | VPENGHVYVEVSVTKAEQELGFAIQTCFISPYSNPDRMSHYTIIENI |
| | | CPKDESVKFYSPKRVHFPIPQADMDKKRFSFVFKPVFNTSLLFLQCE |
| | | LTLCTKMEKHPQKLPKCVPPDEACTSLDASIIWAMMQNKKTFTKPLA |
| | | VIHHEAESKEKGPSMKEPNPISPPIFHGLDTLTVMGIAFAAFVIGAL |
| | | LTGALWYIYSHTGETAGRQQVPTSPPASENSSAAHSIGSTQSTPCSS |
| | | SSTA |
| SEQ | Human | GPEPGALCELSPVSASHPVQALMESFTVLSGCASRGTTGLPQEVHVL |
| ID NO: | TGFBR3 | NLRTAGQGPGQLQREVTLHLNPISSVHIFIHKSVVFLLNSPHPLVWH |
| 3126 | isoform 2 | LKTERLATGVSRLFLVSEGSVVQFSSANFSLTAETEERNFPHGNEHL |
| | (Q03167-2) | LNWARKEYGAVTSFTELKIARNIYIKVGEDQVFPPKCNIGKNFLSLN |
| | | YLAEYLQPKAAEGCVMSSQPQNEEVHIIELITPNSNPYSAFQVDITI |
| | | DIRPSQEDLEVVKNLILILKCKKSVNWVIKSFDVKGSLKIIAPNSIG |
| | | FGKESERSMTMTKSIRDDIPSTQGNLVKWALDNGYSPITSYTMAPVA |
| | | NRFHLRLENNEEMGDEEVHTIPPELRILLDPGALPALQNPPIRGGEG |
| | | QNGGLPFPFPDISRRVWNEEGEDGLPRPKDPVIPSIQLFPGLREPEE |
| | | VQGSVDIALSVKCDNEKMIVAVEKDSFQASGYSGMDVTLLDPTCKAK |
| | | MNGTHFVLESPLNGCGTRPRWSALDGVVYYNSIVIQVPALGDSSGWP |
| | | DGYEDLESGDNGFPGDMDEGDASLFTRPEIVVFNCSLQQVRNPSSFQ |
| | | EQPHGNITFNMELYNTDLFLVPSQGVFSVPENGHVYVEVSVTKAEQE |
| | | LGFAIQTCFISPYSNPDRMSHYTIIENICPKDESVKFYSPKRVHFPI |
| | | PQADMDKKRFSFVFKPVFNTSLLFLQCELTLCTKMEKHPQKLPKCVP |
| | | PDEACTSLDASIIWAMMQNKKTFTKPLAVIHHEAESKEKGPSMKEPN |
| | | PISPPIFHGLDTLTVMGIAFAAFVIGALLTGALWYIYSHTGETAGRQ |
| | | QVPTSPPASENSSAAHSIGSTQSTPCSSSSTA |
| SEQ | Human | GPEPGALCELSPVSASHPVQALMESFTVLSGCASRGTTGLPQEVHVL |
| ID NO: | TGFBR3 | NLRTAGQGPGQLQREVTLHLNPISSVHIFIHKSVVFLLNSPHPLVWH |
| 3108 | fragment 1 | LKTERLATGVSRLFLVSEGSVVQFSSANFSLTAETEERNFPHGNEHL |
| | | LNWARKEYGAVTSFTELKIARNIYIKVGEDQVFPPKCNIGKNFLSLN |
| | | YLAEYLQPKAAEGCVMSSQPQNEEVHIIELITPNSNPYSAFQVDITI |
| | | DIRPSQEDLEVVKNLILILKCKKSVNWVIKSFDVKGSLKIIAPNSIG |
| | | FGKESERSMTMTKSIRDDIPSTQGNLVKWALDNGYSPITSYTMAPVA |
| | | NRFHLRLENNAEEMGDEEVHTIPPELRILLDPGALPALQNPPIRGGE |
| | | GQNGGLPFPFPDISRRVWNEEGEDGLPRPKDPVIPSIQLFPGLREPE |
| | | EVQGSVDIALSVKCDNEKMIVAVEKDSFQASGYSGMDVTLLDPTCKA |
| | | KMNGTHFVLESPLNGCGTRPRWSALDGVVYYNSIVIQVPALGDSSGW |
| | | PDGYEDLESGDNGFPGDMDEGDASLFTRPEIVVFNCSLQQVRNPSSF |
| | | QEQPHGNITFNMELYNTDLFLVPSQGVFSVPENGHVYVEVSVTKAEQ |
| | | ELGFAIQTCFISPYSNPDRMSHYTIIENICPKDESVKFYSPKRVHFP |
| | | IPQADMDKKRFSFVFKPVFNTSLLFLQCELTLCTKMEKHPQKLPKCV |
| | | PPDEACTSLDASIIWAMMQNKKTFTKPLAVIHHEAESKEKGPSMKEP |
| | | NPISPPIFHGLDTLTV |
| SEQ | hCH1-hFc_Hole- | ASTKGPSVFPLAPSSKSTSGGTAALGCLVKDYFPEPVTVSWNSGALT |
| ID NO: | 3x4GS-TGFbR2 | SGVHTFPAVLQSSGLYSLSSVVTVPSSSLGTQTYICNVNHKPSNTKV |
| 3192 | | DKRVEPKSCDKTHTCPPCPAPELLGGPSVFLFPPKPKDTLMISRTPE |
| | | VTCVVVDVSHEDPEVKFNWYVDGVEVHNAKTKPREEQYNSTYRVVSV |
| | | LTVLHQDWLNGKEYKCKVSNKALPAPIEKTISKAKGQPREPQVCTLP |
| | | PSREEMTKNQVSLSCAVKGFYPSDIAVEWESNGQPENNYKTTPPVLD |
| | | SDGSFFLVSKLTVDKSRWQQGNVFSCSVMHEALHNHYTQKSLSLSPG |
| | | XGGGGSGGGGSGGGGSIPPHVQKSVNNDMIVTDNNGAVKFPQLCKFC |
| | | DVRFSTCDNQKSCMSNCSITSICEKPQEVCVAVWRKNDENITLETVC |
| | | HDPKLPYHDFILEDAASPKCIMKEKKKPGETFFMCSCSSDECNDNII |
| | | FSEEYNTSNPD, where in X is K or absent |
| SEQ | hCH1-hFc_Knob- | ASTKGPSVFPLAPSSKSTSGGTAALGCLVKDYFPEPVTVSWNSGALT |
| ID NO: | 3x4GS-TGFbR2 | SGVHTFPAVLQSSGLYSLSSVVTVPSSSLGTQTYICNVNHKPSNTKV |
| 3193 | | DKRVEPKSCDKTHTCPPCPAPELLGGPSVFLFPPKPKDTLMISRTPE |
| | | VTCVVVDVSHEDPEVKFNWYVDGVEVHNAKTKPREEQYNSTYRVVSV |
| | | LTVLHQDWLNGKEYKCKVSNKALPAPIEKTISKAKGQPREPQVYTLP |
| | | PCREEMTKNQVSLWCLVKGFYPSDIAVEWESNGQPENNYKTTPPVLD |
| | | SDGSFFLYSKLTVDKSRWQQGNVFSCSVMHEALHNHYTQKSLSLSPG |
| | | XGGGGSGGGGSGGGGSIPPHVQKSVNNDMIVTDNNGAVKFPQLCKFC |
| | | DVRFSTCDNQKSCMSNCSITSICEKPQEVCVAVWRKNDENITLETVC |
| | | HDPKLPYHDFILEDAASPKCIMKEKKKPGETFFMCSCSSDECNDNII |
| | | FSEEYNTSNPD, where in X is K or absent |
| SEQ | hFc_Hole- | DKTHTCPPCPAPELLGGPSVFLFPPKPKDTLMISRTPEVTCVVVDVS |
| ID NO: | 3x4GS-TGFbR2 | HEDPEVKFNWYVDGVEVHNAKTKPREEQYNSTYRVVSVLTVLHQDWL |
| 3194 | | NGKEYKCKVSNKALPAPIEKTISKAKGQPREPQVCTLPPSREEMTKN |
| | | QVSLSCAVKGFYPSDIAVEWESNGQPENNYKTTPPVLDSDGSFFLVS |
| | | KLTVDKSRWQQGNVFSCSVMHEALHNHYTQKSLSLSPGXGGGGSGGG |
| | | GSGGGGSIPPHVQKSVNNDMIVTDNNGAVKFPQLCKFCDVRFSTCDN |
| | | QKSCMSNCSITSICEKPQEVCVAVWRKNDENITLETVCHDPKLPYHD |
| | | FILEDAASPKCIMKEKKKPGETFFMCSCSSDECNDNIIFSEEYNTSN |
| | | PD, where in X is K or absent |
| SEQ | hFc_Knob- | DKTHTCPPCPAPELLGGPSVFLFPPKPKDTLMISRTPEVTCVVVDVS |
| ID NO: | 3x4GS-TGFbR2 | HEDPEVKFNWYVDGVEVHNAKTKPREEQYNSTYRVVSVLTVLHQDWL |
| 3195 | | NGKEYKCKVSNKALPAPIEKTISKAKGQPREPQVYTLPPCREEMTKN |
| | | QVSLWCLVKGFYPSDIAVEWESNGQPENNYKTTPPVLDSDGSFFLYS |
| | | KLTVDKSRWQQGNVFSCSVMHEALHNHYTQKSLSLSPGXGGGGSGGG |
| | | GSGGGGSIPPHVQKSVNNDMIVTDNNGAVKFPQLCKFCDVRFSTCDN |
| | | QKSCMSNCSITSICEKPQEVCVAVWRKNDENITLETVCHDPKLPYHD |
| | | FILEDAASPKCIMKEKKKPGETFFMCSCSSDECNDNIIFSEEYNTSN |
| | | PD, where in X is K or absent |
| SEQ | TGFbR2-3x4GS- | IPPHVQKSVNNDMIVTDNNGAVKFPQLCKFCDVRFSTCDNQKSCMSN |
| ID NO: | hCH1-hFc_Hole | CSITSICEKPQEVCVAVWRKNDENITLETVCHDPKLPYHDFILEDAA |
| 3196 | | SPKCIMKEKKKPGETFFMCSCSSDECNDNIIFSEEYNTSNPDGGGGS |
| | | GGGGSGGGGSASTKGPSVFPLAPSSKSTSGGTAALGCLVKDYFPEPV |
| | | TVSWNSGALTSGVHTFPAVLQSSGLYSLSSVVTVPSSSLGTQTYICN |
| | | VNHKPSNTKVDKRVEPKSCDKTHTCPPCPAPELLGGPSVFLFPPKPK |
| | | DTLMISRTPEVTCVVVDVSHEDPEVKFNWYVDGVEVHNAKTKPREEQ |
| | | YNSTYRVVSVLTVLHQDWLNGKEYKCKVSNKALPAPIEKTISKAKGQ |
| | | PREPQVCTLPPSREEMTKNQVSLSCAVKGFYPSDIAVEWESNGQPEN |
| | | NYKTTPPVLDSDGSFFLVSKLTVDKSRWQQGNVFSCSVMHEALHNHY |
| | | TQKSLSLSPGX, where in X is K or absent |
| SEQ | TGFbR2-3x4GS- | IPPHVQKSVNNDMIVTDNNGAVKFPQLCKFCDVRFSTCDNQKSCMSN |
| ID NO: | hCH1-hFc_Knob | CSITSICEKPQEVCVAVWRKNDENITLETVCHDPKLPYHDFILEDAA |
| 3197 | | SPKCIMKEKKKPGETFFMCSCSSDECNDNIIFSEEYNTSNPDGGGGS |
| | | GGGGSGGGGSASTKGPSVFPLAPSSKSTSGGTAALGCLVKDYFPEPV |
| | | TVSWNSGALTSGVHTFPAVLQSSGLYSLSSVVTVPSSSLGTQTYICN |
| | | VNHKPSNTKVDKRVEPKSCDKTHTCPPCPAPELLGGPSVFLFPPKPK |
| | | DTLMISRTPEVTCVVVDVSHEDPEVKFNWYVDGVEVHNAKTKPREEQ |
| | | YNSTYRVVSVLTVLHQDWLNGKEYKCKVSNKALPAPIEKTISKAKGQ |
| | | PREPQVYTLPPCREEMTKNQVSLWCLVKGFYPSDIAVEWESNGQPEN |
| | | NYKTTPPVLDSDGSFFLYSKLTVDKSRWQQGNVFSCSVMHEALHNHY |
| | | TQKSLSLSPGX, where in X is K or absent |
| SEQ | TGFbR2-3x4G5- | IPPHVQKSVNNDMIVTDNNGAVKFPQLCKFCDVRFSTCDNQKSCMSN |
| ID NO: | hCLIg_v1 | CSITSICEKPQEVCVAVWRKNDENITLETVCHDPKLPYHDFILEDAA |
| 3198 | | SPKCIMKEKKKPGETFFMCSCSSDECNDNIIFSEEYNTSNPDGGGGS |
| | | GGGGSGGGGSGQPKANPTVTLFPPSSEELQANKATLVCLISDFYPGA |
| | | VTVAWKADGSPVKAGVETTKPSKQSNNKYAASSYLSLTPEQWKSHRS |
| | | YSCQVTHEGSTVEKTVAPTECS |
| SEQ | TGFβR2-3x4GS- | IPPHVQKSVNNDMIVTDNNGAVKFPQLCKFCDVRFSTCDNQKSCMSN |
| ID NO: | hCLIg_vk | CSITSICEKPQEVCVAVWRKNDENITLETVCHDPKLPYHDFILEDAA |
| 3199 | | SPKCIMKEKKKPGETFFMCSCSSDECNDNIIFSEEYNTSNPDGGGGS |
| | | GGGGSGGGGSRTVAAPSVFIFPPSDEQLKSGTASVVCLLNNFYPREA |
| | | KVQWKVDNALQSGNSQESVTEQDSKDSTYSLSSTLTLSKADYEKFIK |
| | | VYACEVTHQGLSSPVTKSFNRGEC |

### Stromal Modifying Moieties

[0397] In other embodiments, the anti-NKp30 antibody molecule (e.g., the multispecific antibody molecule) further comprises one or more stromal modifying moieties. Stromal modifying moieties described herein include moieties (e.g., proteins, e.g., enzymes) capable of degrading a component of the stroma, e.g., an ECM component, e.g., a glycosaminoglycan, e.g., hyaluronan (also known as hyaluronic acid or HA), chondroitin sulfate, chondroitin, dermatan sulfate, heparin sulfate, heparin, entactin, tenascin, aggrecan and keratin sulfate; or an extracellular protein, e.g., collagen, laminin, elastin, fibrinogen, fibronectin, and vitronectin.

[0398] In some embodiments, the stromal modifying moiety is an enzyme. For example, the stromal modifying moiety can include, but is not limited to a hyaluronidase, a collagenase, a chondroitinase, a matrix metalloproteinase (e.g., macrophage metalloelastase).

[0399] Exemplary amino acid and nucleotide sequences for stromal modifying moieties are disclosed in WO 2017/165464, see e.g., pages 131-136, 188-193, incorporated herein by reference.

### Nucleic Acids

[0400] Nucleic acids encoding the aforementioned antibody molecules, e.g., multispecific or multifunctional molecules. are also disclosed.

[0401] In certain embodiments, the invention features nucleic acids comprising nucleotide sequences that encode heavy and light chain variable regions and CDRs or hypervariable loops of the antibody molecules, as described herein. For example, the invention features a first and second nucleic acid encoding heavy and light chain variable regions, respectively, of an antibody molecule chosen from one or more of the antibody molecules disclosed herein. The nucleic acid can comprise a nucleotide sequence as set forth in the tables herein, or a sequence substantially identical thereto (e.g., a sequence at least about 85%, 90%, 95%, 99% or more identical thereto, or which differs by no more than 3, 6, 15, 30, or 45 nucleotides from the sequences shown in the tables herein.

[0402] In certain embodiments, the nucleic acid can comprise a nucleotide sequence encoding at least one, two, or three CDRs or hypervariable loops from a heavy chain variable region having an amino acid sequence as set forth in the tables herein, or a sequence substantially homologous thereto (e.g., a sequence at least about 85%, 90%, 95%, 99% or more identical thereto, and/or having one or more substitutions, e.g., conserved substitutions). In other embodiments, the nucleic acid can comprise a nucleotide sequence encoding at least one, two, or three CDRs or hypervariable loops from a light chain variable region having an amino acid sequence as set forth in the tables herein, or a sequence substantially homologous thereto (e.g., a sequence at least about 85%, 90%, 95%, 99% or more identical thereto, and/or having one or more substitutions, e.g., conserved substitutions). In yet another embodiment, the nucleic acid can comprise a nucleotide sequence encoding at least one, two, three, four, five, or six CDRs or hypervariable loops from heavy and light chain variable regions having an amino acid sequence as set forth in the tables herein, or a sequence substantially homologous thereto (e.g., a sequence at least about 85%, 90%, 95%, 99% or more identical thereto, and/or having one or more substitutions, e.g., conserved substitutions).

[0403] In certain embodiments, the nucleic acid can comprise a nucleotide sequence encoding at least one, two, or three CDRs or hypervariable loops from a heavy chain variable region having the nucleotide sequence as set forth in the tables herein, a sequence substantially homologous thereto (e.g., a sequence at least about 85%, 90%, 95%, 99% or more identical thereto, and/or capable of hybridizing under the stringency conditions described herein). In another embodiment, the nucleic acid can comprise a nucleotide sequence encoding at least one, two, or three CDRs or hypervariable loops from a light chain variable region having the nucleotide sequence as set forth in the tables herein, or a sequence substantially homologous thereto (e.g., a sequence at least about 85%, 90%, 95%, 99% or more identical thereto, and/or capable of hybridizing under the stringency conditions described herein). In yet another embodiment, the nucleic acid can comprise a nucleotide sequence encoding at least one, two, three, four, five, or six CDRs or hypervariable loops from heavy and light chain variable regions having the nucleotide sequence as set forth in the tables herein, or a sequence substantially homologous thereto (e.g., a sequence at least about 85%, 90%, 95%, 99% or more identical thereto, and/or capable of hybridizing under the stringency conditions described herein).

[0404] In certain embodiments, the nucleic acid can comprise a nucleotide sequence encoding a cytokine molecule, an immune cell engager, or a stromal modifying moiety disclosed herein.

[0405] In another aspect, the application features host cells and vectors containing the nucleic acids described herein. The nucleic acids may be present in a single vector or separate vectors present in the same host cell or separate host cell, as described in more detail hereinbelow.

### Vectors

[0406] Further provided herein are vectors comprising the nucleotide sequences encoding a multispecific or multifunctional molecule described herein. In one embodiment, the vectors comprise nucleotides encoding a multispecific or multifunctional molecule described herein. In one embodiment, the vectors comprise the nucleotide sequences described herein. The vectors include, but are not limited to, a virus, plasmid, cosmid, lambda phage or a yeast artificial chromosome (YAC).

[0407] Numerous vector systems can be employed. For example, one class of vectors utilizes DNA elements which are derived from animal viruses such as, for example, bovine papilloma virus, polyoma virus, adenovirus, vaccinia virus, baculovirus, retroviruses (Rous Sarcoma Virus, MMTV or MOMLV) or SV40 virus. Another class of vectors utilizes RNA elements derived from RNA viruses such as Semliki Forest virus, Eastern Equine Encephalitis virus and Flaviviruses.

[0408] Additionally, cells which have stably integrated the DNA into their chromosomes may be selected by introducing one or more markers which allow for the selection of transfected host cells. The marker may provide, for example, prototropy to an auxotrophic host, biocide resistance (e.g., antibiotics), or resistance to heavy metals such as copper, or the like. The selectable marker gene can be either directly linked to the DNA sequences to be expressed, or introduced into the same cell by cotransformation. Additional elements may also be needed for optimal synthesis of mRNA. These elements may include splice signals, as well as transcriptional promoters, enhancers, and termination signals.

[0409] Once the expression vector or DNA sequence containing the constructs has been prepared for expression, the expression vectors may be transfected or introduced into an appropriate host cell. Various techniques may be employed to achieve this, such as, for example, protoplast fusion, calcium phosphate precipitation, electroporation, retroviral transduction, viral transfection, gene gun, lipid based transfection or other conventional techniques. In the case of protoplast fusion, the cells are grown in media and screened for the appropriate activity

[0410] Methods and conditions for culturing the resulting transfected cells and for recovering the antibody molecule produced are known to those skilled in the art, and may be varied or optimized depending upon the specific expression vector and mammalian host cell employed, based upon the present description.

### Cells

[0411] In another aspect, the application features host cells and vectors containing the nucleic acids described herein. The nucleic acids may be present in a single vector or separate vectors present in the same host cell or separate host cell. The host cell can be a eukaryotic cell, e.g., a mammalian cell, an insect cell, a yeast cell, or a prokaryotic cell, e.g., E. coli. For example, the mammalian cell can be a cultured cell or a cell line. Exemplary mammalian cells include lymphocytic cell lines (e.g., NSO), Chinese hamster ovary cells (CHO), COS cells, oocyte cells, and cells from a transgenic animal, e.g., mammary epithelial cell.

[0412] The invention also provides host cells comprising a nucleic acid encoding an antibody molecule as described herein.

[0413] In one embodiment, the host cells are genetically engineered to comprise nucleic acids encoding the antibody molecule.

[0414] In one embodiment, the host cells are genetically engineered by using an expression cassette. The phrase “expression cassette,” refers to nucleotide sequences, which are capable of affecting expression of a gene in hosts compatible with such sequences. Such cassettes may include a promoter, an open reading frame with or without introns, and a termination signal. Additional factors necessary or helpful in effecting expression may also be used, such as, for example, an inducible promoter.

[0415] The invention also provides host cells comprising the vectors described herein.

[0416] The cell can be, but is not limited to, a eukaryotic cell, a bacterial cell, an insect cell, or a human cell. Suitable eukaryotic cells include, but are not limited to, Vero cells, HeLa cells, COS cells, CHO cells, HEK293 cells, BHK cells and MDCKII cells. Suitable insect cells include, but are not limited to, Sf9 cells.

### Uses

[0417] Methods described herein include treating a disorder, e.g., a cancer, an autoimmune or inflammatory disorder, or an infectious disorder, in a subject by using an anti-NKp30 antibody molecule, e.g., a multispecific molecule, described herein, e.g., using a pharmaceutical composition described herein. Also provided are methods for reducing or ameliorating a symptom of a disorder, e.g., a cancer, an autoimmune or inflammatory disorder, or an infectious disorder, in a subject, as well as methods for inhibiting the growth of a diseased cell, e.g., cancer cell, and/or killing or depleting one or more diseased cells, e.g., cancer cells. In embodiments, the methods described herein decrease the size of a tumor and/or decrease the number of cancer cells in a subject administered with a described herein or a pharmaceutical composition described herein.

[0418] In embodiments, the antibody molecule, e.g., multispecific molecules or pharmaceutical composition, is administered to the subject parenterally. In embodiments, the antibody molecule or pharmaceutical composition is administered to the subject intravenously, subcutaneously, intratumorally, intranodally, intramuscularly, intradermally, or intraperitoneally. In embodiments, the cells are administered, e.g., injected, directly into a tumor or lymph node. In embodiments, the cells are administered as an infusion (e.g., as described in Rosenberg et al., New Eng. J. of Med. 319:1676, 1988) or an intravenous push. In embodiments, the cells are administered as an injectable depot formulation.

[0419] In embodiments, the subject is a mammal. In embodiments, the subject is a human, monkey, pig, dog, cat, cow, sheep, goat, rabbit, rat, or mouse. In embodiments, the subject is a human. In embodiments, the subject is a pediatric subject, e.g., less than 18 years of age, e.g., less than 17, 16, 15, 14, 13, 12, 11, 10, 9, 8, 7, 6, 5, 4, 3, 2, 1 or less years of age. In embodiments, the subject is an adult, e.g., at least 18 years of age, e.g., at least 19, 20, 21, 22, 23, 24, 25, 25-30, 30-35, 35-40, 40-50, 50-60, 60-70, 70-80, or 80-90 years of age.

### Cancers

[0420] In embodiments, the cancer is a hematological cancer, a solid tumor or a metastatic lesion thereof. In some embodiments, the anti-NKp30 antibody molecule used to treat the cancer further comprises a tumor targeting moiety, e.g., a tumor targeting moiety as described herein.

[0421] In embodiments, the hematological cancer is a leukemia or a lymphoma. As used herein, a “hematologic cancer” refers to a tumor of the hematopoietic or lymphoid tissues, e.g., a tumor that affects blood, bone marrow, or lymph nodes. Exemplary hematologic malignancies include, but are not limited to, leukemia (e.g., acute lymphoblastic leukemia (ALL), acute myeloid leukemia (AML), chronic lymphocytic leukemia (CLL), chronic myelogenous leukemia (CIVIL), hairy cell leukemia, acute monocytic leukemia (AMoL), chronic myelomonocytic leukemia (CMML), juvenile myelomonocytic leukemia (JMML), or large granular lymphocytic leukemia), lymphoma (e.g., AIDS-related lymphoma, cutaneous T-cell lymphoma, Hodgkin lymphoma (e.g., classical Hodgkin lymphoma or nodular lymphocyte-predominant Hodgkin lymphoma), mycosis fungoides, non-Hodgkin lymphoma (e.g., B-cell non-Hodgkin lymphoma (e.g., Burkitt lymphoma, small lymphocytic lymphoma (CLL/SLL), diffuse large B-cell lymphoma, follicular lymphoma, immunoblastic large cell lymphoma, precursor B-lymphoblastic lymphoma, or mantle cell lymphoma) or T-cell non-Hodgkin lymphoma (mycosis fungoides, anaplastic large cell lymphoma, or precursor T-lymphoblastic lymphoma)), primary central nervous system lymphoma, Sezary syndrome, Waldenström macroglobulinemia), chronic myeloproliferative neoplasm, Langerhans cell histiocytosis, multiple myeloma/plasma cell neoplasm, myelodysplastic syndrome, or myelodysplastic/myeloproliferative neoplasm.

[0422] In embodiments, the cancer is a solid cancer. Exemplary solid cancers include, but are not limited to, ovarian cancer, rectal cancer, stomach cancer, testicular cancer, cancer of the anal region, uterine cancer, colon cancer, rectal cancer, renal-cell carcinoma, liver cancer, non-small cell carcinoma of the lung, cancer of the small intestine, cancer of the esophagus, melanoma, Kaposi's sarcoma, cancer of the endocrine system, cancer of the thyroid gland, cancer of the parathyroid gland, cancer of the adrenal gland, bone cancer, pancreatic cancer, skin cancer, cancer of the head or neck, cutaneous or intraocular malignant melanoma, uterine cancer, brain stem glioma, pituitary adenoma, epidermoid cancer, carcinoma of the cervix squamous cell cancer, carcinoma of the fallopian tubes, carcinoma of the endometrium, carcinoma of the vagina, sarcoma of soft tissue, cancer of the urethra, carcinoma of the vulva, cancer of the penis, cancer of the bladder, cancer of the kidney or ureter, carcinoma of the renal pelvis, spinal axis tumor, neoplasm of the central nervous system (CNS), primary CNS lymphoma, tumor angiogenesis, metastatic lesions of said cancers, or combinations thereof.

[0423] In certain embodiments, the cancer is an epithelial, mesenchymal or hematologic malignancy. In certain embodiments, the cancer treated is a solid tumor (e.g., carcinoid, carcinoma or sarcoma), a soft tissue tumor (e.g., a heme malignancy), and a metastatic lesion, e.g., a metastatic lesion of any of the cancers disclosed herein. In one embodiment, the cancer treated is a fibrotic or desmoplastic solid tumor, e.g., a tumor having one or more of: limited tumor perfusion, compressed blood vessels, fibrotic tumor interstitium, or increased interstitial fluid pressure. In one embodiment, the solid tumor is chosen from one or more of pancreatic (e.g., pancreatic adenocarcinoma or pancreatic ductal adenocarcinoma), breast, colon, colorectal, lung (e.g., small cell lung cancer (SCLC) or non-small cell lung cancer (NSCLC)), skin, ovarian, liver cancer, esophageal cancer, endometrial cancer, gastric cancer, head and neck cancer, kidney, or prostate cancer.

[0424] Examples of cancer include, but are not limited to, carcinoma, lymphoma, blastoma, sarcoma, and leukemia or lymphoid malignancies. More particular examples of such cancers are noted below and include: squamous cell cancer (e.g. epithelial squamous cell cancer), lung cancer including small-cell lung cancer, non-small cell lung cancer, adenocarcinoma of the lung and squamous carcinoma of the lung, cancer of the peritoneum, hepatocellular cancer, gastric or stomach cancer including gastrointestinal cancer, pancreatic cancer, glioblastoma, cervical cancer, ovarian cancer, liver cancer, bladder cancer, hepatoma, breast cancer, colon cancer, rectal cancer, colorectal cancer, endometrial cancer or uterine carcinoma, salivary gland carcinoma, kidney or renal cancer, prostate cancer, vulval cancer, thyroid cancer, hepatic carcinoma, anal carcinoma, penile carcinoma, as well as head and neck cancer. The term “cancer” includes primary malignant cells or tumors (e.g., those whose cells have not migrated to sites in the subject's body other than the site of the original malignancy or tumor) and secondary malignant cells or tumors (e.g., those arising from metastasis, the migration of malignant cells or tumor cells to secondary sites that are different from the site of the original tumor).

[0425] Other examples of cancers or malignancies include, but are not limited to: Acute Childhood Lymphoblastic Leukemia, Acute Lymphoblastic Leukemia, Acute Lymphocytic Leukemia, Acute Myeloid Leukemia, Adrenocortical Carcinoma, Adult (Primary) Hepatocellular Cancer, Adult (Primary) Liver Cancer, Adult Acute Lymphocytic Leukemia, Adult Acute Myeloid Leukemia, Adult Hodgkin's Disease, Adult Hodgkin's Lymphoma, Adult Lymphocytic Leukemia, Adult Non-Hodgkin's Lymphoma, Adult Primary Liver Cancer, Adult Soft Tissue Sarcoma, AIDS-Related Lymphoma, AIDS-Related Malignancies, Anal Cancer, Astrocytoma, Bile Duct Cancer, Bladder Cancer, Bone Cancer, Brain Stem Glioma, Brain Tumors, Breast Cancer, Cancer of the Renal Pelvis and Ureter, Central Nervous System (Primary) Lymphoma, Central Nervous System Lymphoma, Cerebellar Astrocytoma, Cerebral Astrocytoma, Cervical Cancer, Childhood (Primary) Hepatocellular Cancer, Childhood (Primary) Liver Cancer, Childhood Acute Lymphoblastic Leukemia, Childhood Acute Myeloid Leukemia, Childhood Brain Stem Glioma, Childhood Cerebellar Astrocytoma, Childhood Cerebral Astrocytoma, Childhood Extracranial Germ Cell Tumors, Childhood Hodgkin's Disease, Childhood Hodgkin's Lymphoma, Childhood Hypothalamic and Visual Pathway Glioma, Childhood Lymphoblastic Leukemia, Childhood Medulloblastoma, Childhood Non-Hodgkin's Lymphoma, Childhood Pineal and Supratentorial Primitive Neuroectodermal Tumors, Childhood Primary Liver Cancer, Childhood Rhabdomyosarcoma, Childhood Soft Tissue Sarcoma, Childhood Visual Pathway and Hypothalamic Glioma, Chronic Lymphocytic Leukemia, Chronic Myelogenous Leukemia, Colon Cancer, Cutaneous T-Cell Lymphoma, Endocrine Pancreas Islet Cell Carcinoma, Endometrial Cancer, Ependymoma, Epithelial Cancer, Esophageal Cancer, Ewing's Sarcoma and Related Tumors, Exocrine Pancreatic Cancer, Extracranial Germ Cell Tumor, Extragonadal Germ Cell Tumor, Extrahepatic Bile Duct Cancer, Eye Cancer, Female Breast Cancer, Gaucher's Disease, Gallbladder Cancer, Gastric Cancer, Gastrointestinal Carcinoid Tumor, Gastrointestinal Tumors, Germ Cell Tumors, Gestational Trophoblastic Tumor, Hairy Cell Leukemia, Head and Neck Cancer, Hepatocellular Cancer, Hodgkin's Disease, Hodgkin's Lymphoma, Hypergammaglobulinemia, Hypopharyngeal Cancer, Intestinal Cancers, Intraocular Melanoma, Islet Cell Carcinoma, Islet Cell Pancreatic Cancer, Kaposi's Sarcoma, Kidney Cancer, Laryngeal Cancer, Lip and Oral Cavity Cancer, Liver Cancer, Lung Cancer, Lymphoproliferative Disorders, Macroglobulinemia, Male Breast Cancer, Malignant Mesothelioma, Malignant Thymoma, Medulloblastoma, Melanoma, Mesothelioma, Metastatic Occult Primary Squamous Neck Cancer, Metastatic Primary Squamous Neck Cancer, Metastatic Squamous Neck Cancer, Multiple Myeloma, Multiple Myeloma/Plasma Cell Neoplasm, Myelodysplastic Syndrome, Myelogenous Leukemia, Myeloid Leukemia, Myeloproliferative Disorders, Nasal Cavity and Paranasal Sinus Cancer, Nasopharyngeal Cancer, Neuroblastoma, Non-Hodgkin's Lymphoma During Pregnancy, Nonmelanoma Skin Cancer, Non-Small Cell Lung Cancer, Occult Primary Metastatic Squamous Neck Cancer, Oropharyngeal Cancer, Osteo-/Malignant Fibrous Sarcoma, Osteosarcoma/Malignant Fibrous Histiocytoma, Osteosarcoma/Malignant Fibrous Histiocytoma of Bone, Ovarian Epithelial Cancer, Ovarian Germ Cell Tumor, Ovarian Low Malignant Potential Tumor, Pancreatic Cancer, Paraproteinemias, Purpura, Parathyroid Cancer, Penile Cancer, Pheochromocytoma, Pituitary Tumor, Plasma Cell Neoplasm/Multiple Myeloma, Primary Central Nervous System Lymphoma, Primary Liver Cancer, Prostate Cancer, Rectal Cancer, Renal Cell Cancer, Renal Pelvis and Ureter Cancer, Retinoblastoma, Rhabdomyosarcoma, Salivary Gland Cancer, Sarcoidosis Sarcomas, Sezary Syndrome, Skin Cancer, Small Cell Lung Cancer, Small Intestine Cancer, Soft Tissue Sarcoma, Squamous Neck Cancer, Stomach Cancer, Supratentorial Primitive Neuroectodermal and Pineal Tumors, T-Cell Lymphoma, Testicular Cancer, Thymoma, Thyroid Cancer, Transitional Cell Cancer of the Renal Pelvis and Ureter, Transitional Renal Pelvis and Ureter Cancer, Trophoblastic Tumors, Ureter and Renal Pelvis Cell Cancer, Urethral Cancer, Uterine Cancer, Uterine Sarcoma, Vaginal Cancer, Visual Pathway and Hypothalamic Glioma, Vulvar Cancer, Waldenstrom's Macroglobulinemia, Wilms' Tumor, and any other hyperproliferative disease, besides neoplasia, located in an organ system listed above.

[0426] In other embodiments, the multispecific molecule, as described above and herein, is used to treat a hyperproliferative disorder, e.g., a hyperproliferative connective tissue disorder (e.g., a hyperproliferative fibrotic disease). In one embodiment, the hyperproliferative fibrotic disease is multisystemic or organ-specific. Exemplary hyperproliferative fibrotic diseases include, but are not limited to, multisystemic (e.g., systemic sclerosis, multifocal fibrosclerosis, sclerodermatous graft-versus-host disease in bone marrow transplant recipients, nephrogenic systemic fibrosis, scleroderma), and organ-specific disorders (e.g., fibrosis of the eye, lung, liver, heart, kidney, pancreas, skin and other organs). In other embodiments, the disorder is chosen from liver cirrhosis or tuberculosis. In other embodiments, the disorder is leprosy.

[0427] In embodiments, the multispecific molecules (or pharmaceutical composition) are administered in a manner appropriate to the disease to be treated or prevented. The quantity and frequency of administration will be determined by such factors as the condition of the patient, and the type and severity of the patient's disease. Appropriate dosages may be determined by clinical trials. For example, when “an effective amount” or “a therapeutic amount” is indicated, the precise amount of the pharmaceutical composition (or multispecific molecules) to be administered can be determined by a physician with consideration of individual differences in tumor size, extent of infection or metastasis, age, weight, and condition of the subject. In embodiments, the pharmaceutical composition described herein can be administered at a dosage of 10⁴ to 10⁹ cells/kg body weight, e.g., 10⁵ to 10⁶ cells/kg body weight, including all integer values within those ranges. In embodiments, the pharmaceutical composition described herein can be administered multiple times at these dosages. In embodiments, the pharmaceutical composition described herein can be administered using infusion techniques described in immunotherapy (see, e.g., Rosenberg et al., New Eng. J. of Med. 319:1676, 1988).

[0428] In embodiments, the cancer is a myeloproliferative neoplasm, e.g., primary or idiopathic myelofibrosis (MF), essential thrombocytosis (ET), polycythemia vera (PV), or chronic myelogenous leukemia (CIVIL). In embodiments, the cancer is myelofibrosis. In embodiments, the subject has myelofibrosis. In embodiments, the subject has a calreticulin mutation, e.g., a calreticulin mutation disclosed herein. In embodiments, the subject does not have the JAK2-V617F mutation. In embodiments, the subject has the JAK2-V617F mutation. In embodiments, the subject has a MPL mutation. In embodiments, the subject does not have a MPL mutation.

[0429] In embodiments, the cancer is a solid cancer. Exemplary solid cancers include, but are not limited to, ovarian cancer, rectal cancer, stomach cancer, testicular cancer, cancer of the anal region, uterine cancer, colon cancer, rectal cancer, renal-cell carcinoma, liver cancer, non-small cell carcinoma of the lung, cancer of the small intestine, cancer of the esophagus, melanoma, Kaposi's sarcoma, cancer of the endocrine system, cancer of the thyroid gland, cancer of the parathyroid gland, cancer of the adrenal gland, bone cancer, pancreatic cancer, skin cancer, cancer of the head or neck, cutaneous or intraocular malignant melanoma, uterine cancer, brain stem glioma, pituitary adenoma, epidermoid cancer, carcinoma of the cervix squamous cell cancer, carcinoma of the fallopian tubes, carcinoma of the endometrium, carcinoma of the vagina, sarcoma of soft tissue, cancer of the urethra, carcinoma of the vulva, cancer of the penis, cancer of the bladder, cancer of the kidney or ureter, carcinoma of the renal pelvis, spinal axis tumor, neoplasm of the central nervous system (CNS), primary CNS lymphoma, tumor angiogenesis, metastatic lesions of said cancers, or combinations thereof.

### Inflammatory and Autoimmune Disorders

[0430] In some embodiments, the anti-NKp30 antibody molecules, e.g., the multispecific antibody molecules, disclosed herein can be used to treat inflammatory and autoimmune diseases, and graft vs. host disease (GvHD). In some embodiments, the antibody molecules, e.g., the multispecific antibody molecules, disclosed herein deplete autoreactive T cells, e.g., by directing an NK cell, e.g., an NKp30-expressing cell, to an autoreactive T cell. In some embodiments, the anti-NKp30 antibody molecule further comprises a binding specificity that binds to an autoreactive T cell, e.g., an antigen present on the surface of an autoreactive T cell that is associated with the inflammatory or autoimmune disorder.

[0431] As used herein, the term “autoimmune” disease, disorder, or condition refers to a disease where the body's immune system attacks its own cells or tissues. An autoimmune disease can result in the production of autoantibodies that are inappropriately produced and/or excessively produced to a self-antigen or autoantigen. Autoimmune diseases include, but are not limited to, cardiovascular diseases, rheumatoid diseases, glandular diseases, gastrointestinal diseases, cutaneous diseases, hepatic diseases, neurological diseases, muscular diseases, nephric diseases, diseases related to reproduction, connective tissue diseases and systemic diseases. In some embodiments, the autoimmune disease is mediated by T cells, B cells, innate immune cells (e.g., macrophages, eosinophils, or natural killer cells), or complement-mediated pathways.

[0432] Examples of autoimmune disorders that may be treated by administering the antibodies of the present invention include, but are not limited to, alopecia greata, ankylosing spondylitis, antiphospholipid syndrome, autoimmune Addison's disease, autoimmune diseases of the adrenal gland, autoimmune hemolytic anemia, autoimmune hepatitis, autoimmune oophoritis and orchitis, autoimmune thrombocytopenia, Behcet's disease, bullous pemphigoid, cardiomyopathy, celiac sprue-dermatitis, chronic fatigue immune dysfunction syndrome (CFIDS), chronic inflammatory demyelinating polyneuropathy, Churg-Strauss syndrome, cicatrical pemphigoid, CREST syndrome, cold agglutinin disease, Crohn's disease, discoid lupus, essential mixed cryoglobulinemia, fibromyalgia-fibromyositis, glomerulonephritis, Graves' disease, Guillain-Barre, Hashimoto's thyroiditis, idiopathic pulmonary fibrosis, idiopathic thrombocytopenia purpura (ITP), IgA neuropathy, juvenile arthritis, lichen planus, lupus erthematosus, Meniere's disease, mixed connective tissue disease, multiple sclerosis, Neuromyelitis optica (NMO), type 1 or immune-mediated diabetes mellitus, myasthenia gravis, pemphigus vulgaris, pernicious anemia, polyarteritis nodosa, polychrondritis, polyglandular syndromes, polymyalgia rheumatica, polymyositis and dermatomyositis, primary agammaglobulinemia, primary biliary cirrhosis, psoriasis, psoriatic arthritis, Raynauld's phenomenon, Reiter's syndrome, Rheumatoid arthritis, sarcoidosis, scleroderma, Sjogren's syndrome, stiff-man syndrome, systemic lupus erythematosus, lupus erythematosus, takayasu arteritis, temporal arteristis/giant cell arteritis, transverse myelitis, ulcerative colitis, uveitis, vasculitides such as dermatitis herpetiformis vasculitis, vitiligo, and Wegener's granulomatosis. In some embodiments, the autoimmune disorder is SLE or Type-1 diabetes.

[0433] Examples of inflammatory disorders which can be prevented, treated or managed in accordance with the methods of the invention include, but are not limited to, asthma, encephilitis, inflammatory bowel disease, chronic obstructive pulmonary disease (COPD), allergic disorders, septic shock, pulmonary fibrosis, undifferentiated spondyloarthropathy, undifferentiated arthropathy, arthritis, inflammatory osteolysis, and chronic inflammation resulting from chronic viral or bacterial infections.

[0434] Thus, the anti-NKp30 antibody molecules, e.g., multispecific molecules, of the present invention have utility in the treatment of inflammatory and autoimmune diseases.

### Infectious Diseases

[0435] In some embodiments, the anti-NKp30 antibody molecules, e.g., the multispecific antibody molecules, disclosed herein can be used to treat infectious diseases. In some embodiments, the antibody molecules, e.g., the multispecific antibody molecules, disclosed herein deplete cells expressing a viral or bacterial antigen. In some embodiments, the anti-NKp30 antibody molecule further comprises a binding specificity that binds to an antigen present on the surface of an infected cell, e.g., a viral infected cell.

[0436] Some examples of pathogenic viruses causing infections treatable by methods include HIV, hepatitis (A, B, or C), herpes virus (e.g., VZV, HSV-1, HAV-6, HSV-II, and CMV, Epstein Barr virus), adenovirus, influenza virus, flaviviruses, echovirus, rhinovirus, coxsackie virus, cornovirus, respiratory syncytial virus, mumps virus, rotavirus, measles virus, rubella virus, parvovirus, vaccinia virus, HTLV virus, dengue virus, papillomavirus, molluscum virus, poliovirus, rabies virus, JC virus and arboviral encephalitis virus. In one embodiment, the infection is an influenza infection.

[0437] In another embodiment, the infection is a hepatitis infection, e.g., a Hepatitis B or C infection.

[0438] Exemplary viral disorders that can be treated include, but are not limited to, Epstein Bar Virus (EBV), influenza virus, HIV, SIV, tuberculosis, malaria and HCMV.

[0439] Some examples of pathogenic bacteria causing infections treatable by methods of the invention include syphilis, chlamydia, rickettsial bacteria, mycobacteria, staphylococci, streptococci, pneumonococci, meningococci and conococci, klebsiella, proteus, serratia, pseudomonas, legionella, diphtheria, salmonella, bacilli, cholera, tetanus, botulism, anthrax, plague, leptospirosis, and Lymes disease bacteria. The anti-NKp30 antibody molecules can be used in combination with existing treatment modalities for the aforesaid infections. For example, Treatments for syphilis include penicillin (e.g., penicillin G.), tetracycline, doxycycline, ceftriaxone and azithromycin.

### Diagnostic Uses

[0440] In one aspect, the present invention provides a diagnostic method for detecting the presence of a NKp30 protein in vitro (e.g., in a biological sample, such as a tissue biopsy, e.g., from a cancerous tissue) or in vivo (e.g., in vivo imaging in a subject). The method includes: (i) contacting the sample with an antibody molecule described herein, or administering to the subject, the antibody molecule; (optionally) (ii) contacting a reference sample, e.g., a control sample (e.g., a control biological sample, such as plasma, tissue, biopsy) or a control subject)); and (iii) detecting formation of a complex between the antibody molecule, and the sample or subject, or the control sample or subject, wherein a change, e.g., a statistically significant change, in the formation of the complex in the sample or subject relative to the control sample or subject is indicative of the presence of NKp30 in the sample. The antibody molecule can be directly or indirectly labeled with a detectable substance to facilitate detection of the bound or unbound antibody. Suitable detectable substances include various enzymes, prosthetic groups, fluorescent materials, luminescent materials and radioactive materials, as described above and described in more detail below.

[0441] The term “sample,” as it refers to samples used for detecting polypeptides includes, but is not limited to, cells, cell lysates, proteins or membrane extracts of cells, body fluids, or tissue samples.

[0442] Complex formation between the antibody molecule and NKp30 can be detected by measuring or visualizing either the binding molecule bound to the NKp30 antigen or unbound binding molecule. Conventional detection assays can be used, e.g., an enzyme-linked immunosorbent assays (ELISA), a radioimmunoassay (RIA) or tissue immunohistochemistry. Alternative to labeling the antibody molecule, the presence of NKp30 can be assayed in a sample by a competition immunoassay utilizing standards labeled with a detectable substance and an unlabeled antibody molecule. In this assay, the biological sample, the labeled standards and the antibody molecule are combined and the amount of labeled standard bound to the unlabeled binding molecule is determined. The amount of NKp30 in the sample is inversely proportional to the amount of labeled standard bound to the antibody molecule.

### EXAMPLES

[0443] The Examples below are set forth to aid in the understanding of the inventions but are not intended to, and should not be construed to, limit its scope in any way.

### Example 1: Immunization of Armenian Hamster to Generate Anti-NKp30 Antibodies

[0444] Briefly, armenian hamster were immunized with the extracellular domain of human NKp30 protein in complete Freund's adjuvant and boosted twice on day 14 and day 28 with NKp30 in incomplete Freund's adjuvant (IFA). On day 56 one more boost in IFA was given and the animals harvested three days later. Spleens were collected and fused with P3X63Ag8.653 murine myeloma cell line. 0.9×10\hat{ }5 cells/well in 125 ul were seated in 96 well plate and fed with 125 μl of I-20+2ME+HAT (IMDM (4 g/L glucose) supplemented with 20% fetal bovine serum, 4 mM L-glutamine, 1 mM sodium pyruvate, 50 U penicillin, 50 μg streptomycin and 50 μM 2-ME in the absence or presence of HAT or HT for selection, and Hybridoma Cloning Factor (1% final) on days 7, 11 and thereafter as needed. At approximately 2 weeks after fusion (cells are about 50% confluent), supernatant was collected and assayed for binding.

### Example 2: Hybridoma Screen for NKp30 mAbs

[0445] Expi293 cells were transfected with BG160 (hNKp30 cell antigen) 18 hours prior to screening. The day of screening, transfected cells were diluted to 0.05×10^{\hat{ }6}/mL and anti-Armenian hamster Fc Alexa Fluor 488 added to a final concentration of 0.4 ug/mL. 50 uL (2,500 cells) of this mixture was added to each well of a 384 well plate. The same density of untransfected 293 cells with secondary were used as a negative control. 5 uL of hybridoma. supernatant was added to the cell mixture and the plate incubated for 1 hour at 37° C. The plates were then imaged on Mirrorball. Positive clones were identified and subcloned by serial dilution to obtain clonal selected hybridoma. After reconfirmation using the same protocols the hybridoma cells were harvested and the corresponding heavy and light chain sequences recovered. The DNA was subcloned into pcDNA3.4 for subsequent expression of the corresponding antibodies and further validation.

### Example 3: Binding of NKp30 Antibodies to NK92 Cells

[0446] NK-92 cells were washed with PBS containing 0.5% BSA and 0.1% sodium azide (staining buffer) and added to 96-well V-bottom plates with 200,000 cells/well. Hamster NKp30 antibodies were added to the cells in 2.0 fold serial dilutions and incubated for 1 hour at room temperature. The plates were washed twice with staining buffer. The secondary antibody against hamster Fe conjugated to AF647 (Jackson, 127-605-160) was added at 1:100 dilution (1.4 mg/ml stock) and incubated with the cells for 30 minutes at 4° C. followed by washing with staining buffer. Cells were subsequently were fixed for 10 minutes with 4% paraformaldehyde at room temperature. The plates were read on CytoFLEX LS (Beckman Coulter). Data was calculated as the percent-AF747 positive population (FIG. 1).

### Example 4: Bioassay to Measure Activity of NKp30 Antibodies Using NK92 Cell Line

[0447] NKp30 antibodies were three-fold serially diluted in PBS and incubated at 2-8° C. overnight in flat bottom 96 well plates. Plates were washed twice in PBS and 40,000 NK-92 cells were added in growth medium containing IL-2. Plates were incubated at 37° C., 5% CO₂, humidified incubator for 16-24 hours before supernatants were collected. IFNγ levels in supernatants was measured following MSD assay instructions (FIG. 2). Supernatant collected from cells incubated with hamster isotype IgG was used as negative control and supernatants from cells incubated with NKp30 monoclonal antibody (R&D, clone 210847) was utilized as a positive control. Data were generated using hamster anti-NKp30 mABs.

### Example 5: Generation and Characterization of Humanized Anti-NKp30 Antibodies

[0448] A series of hamster anti-NKp30 antibodies were selected. These antibodies were shown to bind to human NKp30 and cynomolgus NKp30 and induce IFNγ production from NK-90 cells (data not shown). The VH and VL sequences of exemplary hamster anti-NKp30 antibodies 15E1, 9G1, 15H6, 9D9, 3A12, and 12D10 are disclosed in Table 9. The VH and VL sequences of exemplary humanized anti-NKp30 antibodies based on 15E1, 9G1, and 15H6 are also disclosed in Table 9. The Kabat CDRs of these antibodies are disclosed in Table 18 and Table 8.

[0449] Two humanized constructs based on 15E1 were selected. The first construct BJM0407 is a Fab comprising a heavy chain variable region comprising the amino acid sequence of SEQ ID NO: 7302 and a lambda light chain variable region comprising the amino acid sequence of SEQ ID NO: 7305. Its corresponding scFv construct BJM0859 comprises the amino acid sequence of SEQ ID NO: 7310. The second construct BJM0411 is a Fab comprising a heavy chain variable region comprising the amino acid sequence of SEQ ID NO: 7302 and a kappa light chain variable region comprising the amino acid sequence of SEQ ID NO: 7309. Its corresponding scFv construct BJM0860 comprises the amino acid sequence of SEQ ID NO: 7311. BJM0407 and BJM0411 showed comparable biophysical characteristics, e.g., binding affinity to NKp30 and thermal stability. The scFv constructs BJM0859 and BJM0860 also showed comparable biophysical properties.

### INCORPORATION BY REFERENCE

[0450] All publications, patents, and Accession numbers mentioned herein are hereby incorporated by reference in their entirety as if each individual publication or patent was specifically and individually indicated to be incorporated by reference.

### EQUIVALENTS

[0451] While specific embodiments of the subject invention have been discussed, the above specification is illustrative and not restrictive. Many variations of the invention will become apparent to those skilled in the art upon review of this specification and the claims below. The full scope of the invention should be determined by reference to the claims, along with their full scope of equivalents, and the specification, along with such variations.

What is claimed is:

1. An isolated antibody molecule that binds to NKp30, comprising:
(i) a heavy chain variable region (VH) comprising a heavy chain complementarity determining region 1 (VHCDR1) amino acid sequence of SEQ ID NO: 7313 (or a sequence with no more than 1, 2, 3, or 4 mutations, e.g., substitutions, additions, or deletions), a VHCDR2 amino acid sequence of SEQ ID NO: 6001 (or a sequence with no more than 1, 2, 3, or 4 mutations, e.g., substitutions, additions, or deletions, and/or a VHCDR3 amino acid sequence of SEQ ID NO: 7315 (or a sequence with no more than 1, 2, 3, or 4 mutations, e.g., substitutions, additions, or deletions; and/or
(ii) a light chain variable region (VL) comprising a light chain complementarity determining region 1 (VLCDR1) amino acid sequence of SEQ ID NO: 7326 (or a sequence with no more than 1, 2, 3, or 4 mutations, e.g., substitutions, additions, or deletions), a VLCDR2 amino acid sequence of SEQ ID NO: 7327 (or a sequence with no more than 1, 2, 3, or 4 mutations, e.g., substitutions, additions, or deletions), and/or a VLCDR3 amino acid sequence of SEQ ID NO: 7329 (or a sequence with no more than 1, 2, 3, or 4 mutations, e.g., substitutions, additions, or deletions).

2. The antibody molecule of claim 1, wherein the antigen binding domain comprises:
(i) a VH comprising the amino acid sequence of any of SEQ ID NOs: 7298 or 7300-7304 (or an amino acid sequence having at least about 75%, 80%, 85%, 90%, 95%, or 99% sequence identity to any of SEQ ID NOs: 7298 or 7300-7304), and/or
(ii) a VL comprising the amino acid sequence of any of SEQ ID NOs: 7299 or 7305-7309 (or an amino acid sequence having at least about 93%, 95%, or 99% sequence identity to any of SEQ ID NOs: 7299 or 7305-7309).

3. The antibody molecule of claim 2, wherein the antigen binding domain comprises:
(i)) a VH comprising the amino acid sequence of SEQ ID NO: 7302 (or an amino acid sequence having at least about 75%, 80%, 85%, 90%, 95%, or 99% sequence identity to 7302), and a VL comprising the amino acid sequence of SEQ ID NO: 7305 (or an amino acid sequence having at least about 75%, 80%, 85%, 90%, 95%, or 99% sequence identity to 7305); or
(ii) a VH comprising the amino acid sequence of SEQ ID NO: 7302 (or an amino acid sequence having at least about 75%, 80%, 85%, 90%, 95%, or 99% sequence identity to 7302), and a VL comprising the amino acid sequence of SEQ ID NO: 7309 (or an amino acid sequence having at least about 75%, 80%, 85%, 90%, 95%, or 99% sequence identity to 7309).

4. The antibody molecule of any of claims 1-3, wherein the antigen binding domain comprises:
(i) an amino acid sequence of SEQ ID NO: 7310 (or an amino acid sequence having at least about 75%, 80%, 85%, 90%, 95%, or 99% sequence identity to 7310); or
(ii) an amino acid sequence of SEQ ID NO: 7311 (or an amino acid sequence having at least about 75%, 80%, 85%, 90%, 95%, or 99% sequence identity to 7311).

5. An isolated antibody molecule that binds to NKp30, comprising:
(i) a heavy chain variable region (VH) comprising a heavy chain complementarity determining region 1 (VHCDR1) amino acid sequence of SEQ ID NO: 6000 (or a sequence with no more than 1, 2, 3, or 4 mutations, e.g., substitutions, additions, or deletions), a VHCDR2 amino acid sequence of SEQ ID NO: 6001 (or a sequence with no more than 1, 2, 3, or 4 mutations, e.g., substitutions, additions, or deletions), and/or a VHCDR3 amino acid sequence of SEQ ID NO: 6002 (or a sequence with no more than 1, 2, 3, or 4 mutations, e.g., substitutions, additions, or deletions), and
(ii) a light chain variable region (VL) comprising a light chain complementarity determining region 1 (VLCDR1) amino acid sequence of SEQ ID NO: 6063 (or a sequence with no more than 1, 2, 3, or 4 mutations, e.g., substitutions, additions, or deletions), a VLCDR2 amino acid sequence of SEQ ID NO: 6064 (or a sequence with no more than 1, 2, 3, or 4 mutations, e.g., substitutions, additions, or deletions), and/or a VLCDR3 amino acid sequence of SEQ ID NO: 7293 (or a sequence with no more than 1, 2, 3, or 4 mutations, e.g., substitutions, additions, or deletions).

6. The antibody molecule of claim 5, wherein the antigen binding domain comprises:
(1) a heavy chain variable region (VH) comprising a heavy chain framework region 1 (VHFWR1) amino acid sequence of SEQ ID NO: 6003 (or a sequence with no more than 1, 2, 3, 4, 5, or 6 mutations, e.g., substitutions, additions, or deletions, therefrom), a VHFWR2 amino acid sequence of SEQ ID NO: 6004 (or a sequence with no more than 1, 2, 3, 4, 5, or 6 mutations, e.g., substitutions, additions, or deletions, therefrom), a VHFWR3 amino acid sequence of SEQ ID NO: 6005 (or a sequence with no more than 1, 2, 3, 4, 5, or 6 mutations, e.g., substitutions, additions, or deletions, therefrom), or a VHFWR4 amino acid sequence of SEQ ID NO: 6006 (or a sequence with no more than 1, 2, 3, 4, 5, or 6 mutations, e.g., substitutions, additions, or deletions, therefrom), and/or
(2) a light chain variable region (VL) comprising a light chain framework region 1 (VLFWR1) amino acid sequence of SEQ ID NO: 6066 (or a sequence with no more than 1, 2, 3, 4, 5, or 6 mutations, e.g., substitutions, additions, or deletions, therefrom), a VLFWR2 amino acid sequence of SEQ ID NO: 6067 (or a sequence with no more than 1, 2, 3, 4, 5, or 6 mutations, e.g., substitutions, additions, or deletions, therefrom), a VLFWR3 amino acid sequence of SEQ ID NO: 7292 (or a sequence with no more than 1, 2, 3, 4, 5, or 6 mutations, e.g., substitutions, additions, or deletions, therefrom), or a VLFWR4 amino acid sequence of SEQ ID NO: 6069 (or a sequence with no more than 1, 2, 3, 4, 5, or 6 mutations, e.g., substitutions, additions, or deletions, therefrom).

7. The antibody molecule of either of claim 5 or 6, wherein the antigen binding domain comprises:
(i) a VH comprising the amino acid sequence of SEQ ID NO: 6121 (or an amino acid sequence having at least about 75%, 80%, 85%, 90%, 95%, or 99% sequence identity to SEQ ID NO: 6121), and/or
(ii) a VL comprising the amino acid sequence of SEQ ID NO: 7294 (or an amino acid sequence having at least about 93%, 95%, or 99% sequence identity to SEQ ID NO: 7294).

8. The antibody molecule of any of claims 5-7, wherein the antigen binding domain comprises:
(i) a heavy chain variable region (VH) comprising a heavy chain complementarity determining region 1 (VHCDR1) amino acid sequence of SEQ ID NO: 6007 (or a sequence with no more than 1, 2, 3, or 4 mutations, e.g., substitutions, additions, or deletions), a VHCDR2 amino acid sequence of SEQ ID NO: 6008 (or a sequence with no more than 1, 2, 3, or 4 mutations, e.g., substitutions, additions, or deletions), and/or a VHCDR3 amino acid sequence of SEQ ID NO: 6009 (or a sequence with no more than 1, 2, 3, or 4 mutations, e.g., substitutions, additions, or deletions), and
(ii) a light chain variable region (VL) comprising a light chain complementarity determining region 1 (VLCDR1) amino acid sequence of SEQ ID NO: 6070 (or a sequence with no more than 1, 2, 3, or 4 mutations, e.g., substitutions, additions, or deletions), a VLCDR2 amino acid sequence of SEQ ID NO: 6071 (or a sequence with no more than 1, 2, 3, or 4 mutations, e.g., substitutions, additions, or deletions), and/or a VLCDR3 amino acid sequence of SEQ ID NO: 6072 (or a sequence with no more than 1, 2, 3, or 4 mutations, e.g., substitutions, additions, or deletions).

9. The antibody molecule of any of claims 5-8, wherein the antigen binding domain comprises:
(1) a heavy chain variable region (VH) comprising a heavy chain framework region 1 (VHFWR1) amino acid sequence of SEQ ID NO: 6010 (or a sequence with no more than 1, 2, 3, 4, 5, or 6 mutations, e.g., substitutions, additions, or deletions, therefrom), a VHFWR2 amino acid sequence of SEQ ID NO: 6011 (or a sequence with no more than 1, 2, 3, 4, 5, or 6 mutations, e.g., substitutions, additions, or deletions, therefrom), a VHFWR3 amino acid sequence of SEQ ID NO: 6012 (or a sequence with no more than 1, 2, 3, 4, 5, or 6 mutations, e.g., substitutions, additions, or deletions, therefrom), or a VHFWR4 amino acid sequence of SEQ ID NO: 6013 (or a sequence with no more than 1, 2, 3, 4, 5, or 6 mutations, e.g., substitutions, additions, or deletions, therefrom), and/or
(2) a light chain variable region (VL) comprising a light chain framework region 1 (VLFWR1) amino acid sequence of SEQ ID NO: 6073 (or a sequence with no more than 1, 2, 3, 4, 5, or 6 mutations, e.g., substitutions, additions, or deletions, therefrom), a VLFWR2 amino acid sequence of SEQ ID NO: 6074 (or a sequence with no more than 1, 2, 3, 4, 5, or 6 mutations, e.g., substitutions, additions, or deletions, therefrom), a VLFWR3 amino acid sequence of SEQ ID NO: 6075 (or a sequence with no more than 1, 2, 3, 4, 5, or 6 mutations, e.g., substitutions, additions, or deletions, therefrom), or a VLFWR4 amino acid sequence of SEQ ID NO: 6076 (or a sequence with no more than 1, 2, 3, 4, 5, or 6 mutations, e.g., substitutions, additions, or deletions, therefrom).

10. The antibody molecule of any one of claims 5-9, wherein the antigen binding domain comprises:
(i) a VH comprising the amino acid sequence of SEQ ID NO: 6122 (or an amino acid sequence having at least about 75%, 80%, 85%, 90%, 95%, or 99% sequence identity to SEQ ID NO: 6122), and/or
(ii) a VL comprising the amino acid sequence of SEQ ID NO: 6136 (or an amino acid sequence having at least about 93%, 95%, or 99% sequence identity to SEQ ID NO: 6136).

11. A multispecific molecule comprising the antibody molecule of any of claims 1-10.

12. The multispecific molecule of claim 11, further comprising one, two, three, four or more of:
a. a tumor targeting moiety, e.g., as described herein;
b. a cytokine molecule, e.g., as described herein;
c. a T cell engager, e.g., as described herein; or
d. a stromal modifying moiety, e.g., as described herein.

13. The multispecific molecule of claim 11, further comprising a binding specificity that binds to an autoreactive T cell, e.g., an antigen present on the surface of an autoreactive T cell that is associated with the inflammatory or autoimmune disorder.

14. The multispecific molecule of claim 11, further comprising a binding specificity that binds to an infected cell, e.g., a viral or bacterial infected cell.

15. The antibody molecule of any of claims 1-10, or the multispecific molecule of any of claims 11-14, which is a monospecific antibody molecule, a bispecific antibody molecule, or a trispecific antibody molecule.

16. The antibody molecule of any of claims 1-10, or the multispecific molecule of any of claims 11-14, which is a monovalent antibody molecule, a bivalent antibody molecule, or a trivalent antibody molecule.

17. The antibody molecule of any of claim 1-10, 15, or 16, or the multispecific molecule of any of claims 11-15, which is a full antibody (e.g., an antibody that includes at least one, and preferably two, complete heavy chains, and at least one, and preferably two, complete light chains), or an antigen-binding fragment (e.g., a Fab, F(ab)2, Fv, a single chain Fv, a single domain antibody, a diabody (dAb), a bivalent antibody, or bispecific antibody or fragment thereof, a single domain variant thereof, or a camelid antibody).

18. The antibody molecule or the multispecific molecule of any of claims 1-17, which comprises a heavy chain constant region chosen from IgG1, IgG2, IgG3, or IgG4, or a fragment thereof.

19. The antibody molecule or the multispecific molecule of any of claims 1-18, which comprises a light chain constant region chosen from the light chain constant regions of kappa or lambda, or a fragment thereof.

20. The antibody molecule or the multispecific molecule of any of claims 1-19, wherein the immunoglobulin chain constant region (e.g., Fc region) is altered, e.g., mutated, to increase or decrease one or more of: Fc receptor binding, antibody glycosylation, the number of cysteine residues, effector cell function, or complement function.

21. The antibody molecule or the multispecific molecule of any of claims 1-20, wherein an interface of a first and second immunoglobulin chain constant regions (e.g., Fc region) is altered, e.g., mutated, to increase or decrease dimerization, e.g., relative to a non-engineered interface.

22. The antibody molecule or the multispecific molecule of claim 21, wherein the dimerization of the immunoglobulin chain constant region (e.g., Fc region) is enhanced by providing an Fc interface of a first and a second Fc region with one or more of: a paired cavity-protuberance (“knob-in-a hole”), an electrostatic interaction, or a strand-exchange, such that a greater ratio of heteromultimer:homomultimer forms, e.g., relative to a non-engineered interface.

23. The antibody molecule or the multispecific molecule of claim 21 or 22, wherein the immunoglobulin chain constant region (e.g., Fc region) comprises an amino acid substitution at a position chosen from one or more of 347, 349, 350, 351, 366, 368, 370, 392, 394, 395, 397, 398, 399, 405, 407, or 409, e.g., of the Fc region of human IgG1.

24. The antibody molecule or the multispecific molecule of claim 21, wherein the immunoglobulin chain constant region (e.g., Fc region) comprises an amino acid substitution chosen from: T366S, L368A, or Y407V (e.g., corresponding to a cavity or hole), or T366W (e.g., corresponding to a protuberance or knob), or a combination thereof.

25. The antibody molecule or the multispecific molecule of any of claims 1-24, further comprising a linker, e.g., a linker between one or more of: the targeting moiety and the cytokine molecule or the stromal modifying moiety, the targeting moiety and the immune cell engager, the cytokine molecule or the stromal modifying moiety, and the immune cell engager, the cytokine molecule or the stromal modifying moiety and the immunoglobulin chain constant region (e.g., the Fc region), the targeting moiety and the immunoglobulin chain constant region, or the immune cell engager and the immunoglobulin chain constant region.

26. The antibody molecule or the multispecific molecule of claim 25, wherein the linker is selected from: a cleavable linker, a non-cleavable linker, a peptide linker, a flexible linker, a rigid linker, a helical linker, or a non-helical linker.

27. The antibody molecule or the multispecific molecule of claim 26, wherein the linker is a peptide linker.

28. The antibody molecule or the multispecific molecule of claim 27, wherein the peptide linker comprises Gly and Ser.

29. An isolated nucleic acid molecule, which comprises the nucleotide sequence encoding any of the antibody molecules or multispecific or multifunctional molecules described herein, or a nucleotide sequence substantially homologous thereto (e.g., at least 95% to 99.9% identical thereto).

30. An isolated nucleic acid encoding the antibody molecule or the multispecific molecule of any of claims 1-29.

31. A vector, e.g., an expression vector, comprising one or more of the nucleic acid molecules of claim 29 or 30.

32. A host cell comprising the nucleic acid molecule or the vector of any one of claims 29-31.

33. A method of making, e.g., producing, the antibody molecule or the multispecific or multifunctional molecule polypeptide of any of claims 1-28, comprising culturing the host cell of claim 32, under suitable conditions, e.g., conditions suitable for gene expression and/or homo- or heterodimerization.

34. A pharmaceutical composition comprising the antibody molecule or the multispecific or multifunctional molecule polypeptide of any of claims 1-28 and a pharmaceutically acceptable carrier, excipient, or stabilizer.

35. A method of treating a cancer, comprising administering to a subject in need thereof the antibody molecule or the multispecific or multifunctional molecule polypeptide of any of claim 1-12 or 15-28, wherein the multispecific antibody is administered in an amount effective to treat the cancer.

36. The antibody molecule or the multispecific or multifunctional molecule polypeptide of any of claim 1-12 or 15-28 for use in treating cancer.

37. The method of claim 35 or the use of claim 36, wherein the cancer is a solid tumor cancer, or a metastatic lesion.

38. The method of claim 37 or the use of claim 37, wherein the solid tumor cancer is one or more of pancreatic (e.g., pancreatic adenocarcinoma), breast, colorectal, lung (e.g., small or non-small cell lung cancer), skin, ovarian, or liver cancer.

39. The method of claim 35 or the use of claim 36, wherein the cancer is a hematological cancer.

40. The method of any of claim 35 or 37-39 or the use of any of claims 36-39, further comprising administering a second therapeutic treatment.

41. The method of claim 40 or the use of claim 40, wherein the second therapeutic treatment comprises a therapeutic agent (e.g., a chemotherapeutic agent, a biologic agent, hormonal therapy), radiation, or surgery.

42. The method of claim 41 or the use of claim 41, wherein the therapeutic agent is selected from: a chemotherapeutic agent, or a biologic agent.

43. A method of treating an autoimmune or an inflammatory disorder, comprising administering to a subject in need thereof the antibody molecule or the multispecific or multifunctional molecule polypeptide of any of claim 1-11, 13, or 15-28, wherein the multispecific antibody is administered in an amount effective to treat the autoimmune or the inflammatory disorder.

44. The antibody molecule or the multispecific or multifunctional molecule polypeptide of any of claim 1-11, 13, or 15-28 for use in treating an autoimmune or an autoinflammatory disorder.

45. A method of treating an infectious disorder, comprising administering to a subject in need thereof the antibody molecule or the multispecific or multifunctional molecule polypeptide of any of claim 1-11 or 14-28, wherein the multispecific antibody is administered in an amount effective to treat the infectious disorder.

46. The antibody molecule or the multispecific or multifunctional molecule polypeptide of any of claim 1-11 or 14-28 for use in treating an infectious disorder.

The application's sequence listing, which the Patent Office published only in electronic form, follows.

SEQUENCE LISTING (7385 sequences)

SEQ ID NO: 1-41 - skipped (41 entries)

SEQ ID NO: 42 - protein, 5 aa, Artificial Sequence
  source: /note="Description of Artificial Sequence: Synthetic peptide"
GGGGS

SEQ ID NO: 43 - protein, 10 aa, Artificial Sequence
  source: /note="Description of Artificial Sequence: Synthetic peptide"
GGGGSGGGGS

SEQ ID NO: 44 - protein, 15 aa, Artificial Sequence
  source: /note="Description of Artificial Sequence: Synthetic peptide"
GGGGSGGGGSGGGGS

SEQ ID NO: 45 - protein, 17 aa, Artificial Sequence
  source: /note="Description of Artificial Sequence: Synthetic peptide"
DVPSGPGGGGGSGGGGS

SEQ ID NO: 46-74 - skipped (29 entries)

SEQ ID NO: 75 - protein, 14 aa, Artificial Sequence
  source: /note="Description of Artificial Sequence: Synthetic peptide"
AEAAAKEAAAKAAA

SEQ ID NO: 76 - protein, 19 aa, Artificial Sequence
  source: /note="Description of Artificial Sequence: Synthetic peptide"
AEAAAKEAAAKEAAAKAAA

SEQ ID NO: 77 - protein, 24 aa, Artificial Sequence
  source: /note="Description of Artificial Sequence: Synthetic peptide"
AEAAAKEAAAKEAAAKEAAAKAAA

SEQ ID NO: 78 - protein, 29 aa, Artificial Sequence
  source: /note="Description of Artificial Sequence: Synthetic peptide"
AEAAAKEAAAKEAAAKEAAAKEAAAKAAA

SEQ ID NO: 79-3091 - skipped (3013 entries)

SEQ ID NO: 3092 - protein, 390 aa, Homo sapiens
MPPSGLRLLLLLLPLLWLLVLTPGRPAAGLSTCKTIDMELVKRKRIEAIRGQILSKLRLASPPSQGEVPPGPLPEAVLALYNSTRDRVAGESAEPEPEPEADYYAKEVTRVLMVETHNEIYDKFKQSTHSIYMFFNTSELREAVPEPVLLSRAELRLLRLKLKVEQHVELYQKYSNNSWRYLSNRLLAPSDSPEWLSFDVTGVVRQWLSRGGEIEGFRLSAHCSCDSRDNTLQVDINGFTTGRRGDLATIHGMNRPFLLLMATPLERAQHLQSSRHRRALDTNYCFSSTEKNCCVRQLYIDFRKDLGWKWIHEPKGYHANFCLGPCPYIWSLDTQYSKVLALYNQHNPGASAAPCCVPQALEPLPIVYYVGRKPKVEQLSNMIVRSCKCS

SEQ ID NO: 3093 - protein, 414 aa, Homo sapiens
MHYCVLSAFLILHLVTVALSLSTCSTLDMDQFMRKRIEAIRGQILSKLKLTSPPEDYPEPEEVPPEVISIYNSTRDLLQEKASRRAAACERERSDEEYYAKEVYKIDMPPFFPSENAIPPTFYRPYFRIVRFDVSAMEKNASNLVKAEFRVFRLQNPKARVPEQRIELYQILKSKDLTSPTQRYIDSKVVKTRAEGEWLSFDVTDAVHEWLHHKDRNLGFKISLHCPCCTFVPSNNYIIPNKSEELEARFAGIDGTSTYTSGDQKTIKSTRKKNSGKTPHLLLMLLPSYRLESQQTNRRKKRALDAAYCFRNVQDNCCLRPLYIDFKRDLGWKWIHEPKGYNANFCAGACPYLWSSDTQHSRVLSLYNTINPEASASPCCVSQDLEPLTILYYIGKTPKIEQLSNMIVKSCKCS

SEQ ID NO: 3094 - protein, 412 aa, Homo sapiens
MKMHLQRALVVLALLNFATVSLSLSTCTTLDFGHIKKKRVEAIRGQILSKLRLTSPPEPTVMTHVPYQVLALYNSTRELLEEMHGEREEGCTQENTESEYYAKEIHKFDMIQGLAEHNELAVCPKGITSKVFRFNVSSVEKNRTNLFRAEFRVLRVPNPSSKRNEQRIELFQILRPDEHIAKQRYIGGKNLPTRGTAEWLSFDVTDTVREWLLRRESNLGLEISIHCPCHTFQPNGDILENIHEVMEIKFKGVDNEDDHGRGDLGRLKKQKDHHNPHLILMMIPPHRLDNPGQGGQRKKRALDTNYCFRNLEENCCVRPLYIDFRQDLGWKWVHEPKGYYANFCSGPCPYLRSADTTHSTVLGLYNTLNPEASASPCCVPQDLEPLTILYYVGRTPKVEQLSNMVVKSCKCS

SEQ ID NO: 3095 - protein, 503 aa, Homo sapiens
MEAAVAAPRPRLLLLVLAAAAAAAAALLPGATALQCFCHLCTKDNFTCVTDGLCFVSVTETTDKVIHNSMCIAEIDLIPRDRPFVCAPSSKTGSVTTTYCCNQDHCNKIELPTTVKSSPGLGPVELAAVIAGPVCFVCISLMLMVYICHNRTVIHHRVPNEEDPSLDRPFISEGTTLKDLIYDMTTSGSGSGLPLLVQRTIARTIVLQESIGKGRFGEVWRGKWRGEEVAVKIFSSREERSWFREAEIYQTVMLRHENILGFIAADNKDNGTWTQLWLVSDYHEHGSLFDYLNRYTVTVEGMIKLALSTASGLAHLHMEIVGTQGKPAIAHRDLKSKNILVKKNGTCCIADLGLAVRHDSATDTIDIAPNHRVGTKRYMAPEVLDDSINMKHFESFKRADIYAMGLVFWEIARRCSIGGIHEDYQLPYYDLVPSDPSVEEMRKVVCEQKLRPNIPNRWQSCEALRVMAKIMRECWYANGAARLTALRIKKTLSQLSQQEGIKM

SEQ ID NO: 3096 - protein, 507 aa, Homo sapiens
MEAAVAAPRPRLLLLVLAAAAAAAAALLPGATALQCFCHLCTKDNFTCVTDGLCFVSVTETTDKVIHNSMCIAEIDLIPRDRPFVCAPSSKTGSVTTTYCCNQDHCNKIELPTTGPFSVKSSPGLGPVELAAVIAGPVCFVCISLMLMVYICHNRTVIHHRVPNEEDPSLDRPFISEGTTLKDLIYDMTTSGSGSGLPLLVQRTIARTIVLQESIGKGRFGEVWRGKWRGEEVAVKIFSSREERSWFREAEIYQTVMLRHENILGFIAADNKDNGTWTQLWLVSDYHEHGSLFDYLNRYTVTVEGMIKLALSTASGLAHLHMEIVGTQGKPAIAHRDLKSKNILVKKNGTCCIADLGLAVRHDSATDTIDIAPNHRVGTKRYMAPEVLDDSINMKHFESFKRADIYAMGLVFWEIARRCSIGGIHEDYQLPYYDLVPSDPSVEEMRKVVCEQKLRPNIPNRWQSCEALRVMAKIMRECWYANGAARLTALRIKKTLSQLSQQEGIKM

SEQ ID NO: 3097 - protein, 426 aa, Homo sapiens
MEAAVAAPRPRLLLLVLAAAAAAAAALLPGATALQCFCHLCTKDNFTCVTDGLCFVSVTETTDKVIHNSMCIAEIDLIPRDRPFVCAPSSKTGSVTTTYCCNQDHCNKIELPTTGLPLLVQRTIARTIVLQESIGKGRFGEVWRGKWRGEEVAVKIFSSREERSWFREAEIYQTVMLRHENILGFIAADNKDNGTWTQLWLVSDYHEHGSLFDYLNRYTVTVEGMIKLALSTASGLAHLHMEIVGTQGKPAIAHRDLKSKNILVKKNGTCCIADLGLAVRHDSATDTIDIAPNHRVGTKRYMAPEVLDDSINMKHFESFKRADIYAMGLVFWEIARRCSIGGIHEDYQLPYYDLVPSDPSVEEMRKVVCEQKLRPNIPNRWQSCEALRVMAKIMRECWYANGAARLTALRIKKTLSQLSQQEGIKM

SEQ ID NO: 3098 - protein, 567 aa, Homo sapiens
MGRGLLRGLWPLHIVLWTRIASTIPPHVQKSVNNDMIVTDNNGAVKFPQLCKFCDVRFSTCDNQKSCMSNCSITSICEKPQEVCVAVWRKNDENITLETVCHDPKLPYHDFILEDAASPKCIMKEKKKPGETFFMCSCSSDECNDNIIFSEEYNTSNPDLLLVIFQVTGISLLPPLGVAISVIIIFYCYRVNRQQKLSSTWETGKTRKLMEFSEHCAIILEDDRSDISSTCANNINHNTELLPIELDTLVGKGRFAEVYKAKLKQNTSEQFETVAVKIFPYEEYASWKTEKDIFSDINLKHENILQFLTAEERKTELGKQYWLITAFHAKGNLQEYLTRHVISWEDLRKLGSSLARGIAHLHSDHTPCGRPKMPIVHRDLKSSNILVKNDLTCCLCDFGLSLRLDPTLSVDDLANSGQVGTARYMAPEVLESRMNLENVESFKQTDVYSMALVLWEMTSRCNAVGEVKDYEPPFGSKVREHPCVESMKDNVLRDRGRPEIPSFWLNHQGIQMVCETLTECWDHDPEARLTAQCVAERFSELEHLDRLSGRSCSEEKIPEDGSLNTTK

SEQ ID NO: 3099 - protein, 592 aa, Homo sapiens
MGRGLLRGLWPLHIVLWTRIASTIPPHVQKSDVEMEAQKDEIICPSCNRTAHPLRHINNDMIVTDNNGAVKFPQLCKFCDVRFSTCDNQKSCMSNCSITSICEKPQEVCVAVWRKNDENITLETVCHDPKLPYHDFILEDAASPKCIMKEKKKPGETFFMCSCSSDECNDNIIFSEEYNTSNPDLLLVIFQVTGISLLPPLGVAISVIIIFYCYRVNRQQKLSSTWETGKTRKLMEFSEHCAIILEDDRSDISSTCANNINHNTELLPIELDTLVGKGRFAEVYKAKLKQNTSEQFETVAVKIFPYEEYASWKTEKDIFSDINLKHENILQFLTAEERKTELGKQYWLITAFHAKGNLQEYLTRHVISWEDLRKLGSSLARGIAHLHSDHTPCGRPKMPIVHRDLKSSNILVKNDLTCCLCDFGLSLRLDPTLSVDDLANSGQVGTARYMAPEVLESRMNLENVESFKQTDVYSMALVLWEMTSRCNAVGEVKDYEPPFGSKVREHPCVESMKDNVLRDRGRPEIPSFWLNHQGIQMVCETLTECWDHDPEARLTAQCVAERFSELEHLDRLSGRSCSEEKIPEDGSLNTTK

SEQ ID NO: 3100 - protein, 137 aa, Homo sapiens
TIPPHVQKSVNNDMIVTDNNGAVKFPQLCKFCDVRFSTCDNQKSCMSNCSITSICEKPQEVCVAVWRKNDENITLETVCHDPKLPYHDFILEDAASPKCIMKEKKKPGETFFMCSCSSDECNDNIIFSEEYNTSNPD

SEQ ID NO: 3101 - protein, 136 aa, Homo sapiens
IPPHVQKSVNNDMIVTDNNGAVKFPQLCKFCDVRFSTCDNQKSCMSNCSITSICEKPQEVCVAVWRKNDENITLETVCHDPKLPYHDFILEDAASPKCIMKEKKKPGETFFMCSCSSDECNDNIIFSEEYNTSNPD

SEQ ID NO: 3102 - protein, 162 aa, Homo sapiens
TIPPHVQKSDVEMEAQKDEIICPSCNRTAHPLRHINNDMIVTDNNGAVKFPQLCKFCDVRFSTCDNQKSCMSNCSITSICEKPQEVCVAVWRKNDENITLETVCHDPKLPYHDFILEDAASPKCIMKEKKKPGETFFMCSCSSDECNDNIIFSEEYNTSNPD

SEQ ID NO: 3103 - protein, 101 aa, Homo sapiens
QLCKFCDVRFSTCDNQKSCMSNCSITSICEKPQEVCVAVWRKNDENITLETVCHDPKLPYHDFILEDAASPKCIMKEKKKPGETFFMCSCSSDECNDNIIF

SEQ ID NO: 3104 - protein, 93 aa, Homo sapiens
LQCFCHLCTKDNFTCVTDGLCFVSVTETTDKVIHNSMCIAEIDLIPRDRPFVCAPSSKTGSVTTTYCCNQDHCNKIELPTTVKSSPGLGPVEL

SEQ ID NO: 3105 - protein, 79 aa, Homo sapiens
ALQCFCHLCTKDNFTCVTDGLCFVSVTETTDKVIHNSMCIAEIDLIPRDRPFVCAPSSKTGSVTTTYCCNQDHCNKIEL

SEQ ID NO: 3106 - protein, 851 aa, Homo sapiens
MTSHYVIAIFALMSSCLATAGPEPGALCELSPVSASHPVQALMESFTVLSGCASRGTTGLPQEVHVLNLRTAGQGPGQLQREVTLHLNPISSVHIHHKSVVFLLNSPHPLVWHLKTERLATGVSRLFLVSEGSVVQFSSANFSLTAETEERNFPHGNEHLLNWARKEYGAVTSFTELKIARNIYIKVGEDQVFPPKCNIGKNFLSLNYLAEYLQPKAAEGCVMSSQPQNEEVHIIELITPNSNPYSAFQVDITIDIRPSQEDLEVVKNLILILKCKKSVNWVIKSFDVKGSLKIIAPNSIGFGKESERSMTMTKSIRDDIPSTQGNLVKWALDNGYSPITSYTMAPVANRFHLRLENNAEEMGDEEVHTIPPELRILLDPGALPALQNPPIRGGEGQNGGLPFPFPDISRRVWNEEGEDGLPRPKDPVIPSIQLFPGLREPEEVQGSVDIALSVKCDNEKMIVAVEKDSFQASGYSGMDVTLLDPTCKAKMNGTHFVLESPLNGCGTRPRWSALDGVVYYNSIVIQVPALGDSSGWPDGYEDLESGDNGFPGDMDEGDASLFTRPEIVVFNCSLQQVRNPSSFQEQPHGNITFNMELYNTDLFLVPSQGVFSVPENGHVYVEVSVTKAEQELGFAIQTCFISPYSNPDRMSHYTIIENICPKDESVKFYSPKRVHFPIPQADMDKKRFSFVFKPVFNTSLLFLQCELTLCTKMEKHPQKLPKCVPPDEACTSLDASIIWAMMQNKKTFTKPLAVIHHEAESKEKGPSMKEPNPISPPIFHGLDTLTVMGIAFAAFVIGALLTGALWYIYSHTGETAGRQQVPTSPPASENSSAAHSIGSTQSTPCSSSSTA

SEQ ID NO: 3107 - protein, 850 aa, Homo sapiens
MTSHYVIAIFALMSSCLATAGPEPGALCELSPVSASHPVQALMESFTVLSGCASRGTTGLPQEVHVLNLRTAGQGPGQLQREVTLHLNPISSVHIHHKSVVFLLNSPHPLVWHLKTERLATGVSRLFLVSEGSVVQFSSANFSLTAETEERNFPHGNEHLLNWARKEYGAVTSFTELKIARNIYIKVGEDQVFPPKCNIGKNFLSLNYLAEYLQPKAAEGCVMSSQPQNEEVHIIELITPNSNPYSAFQVDITIDIRPSQEDLEVVKNLILILKCKKSVNWVIKSFDVKGSLKIIAPNSIGFGKESERSMTMTKSIRDDIPSTQGNLVKWALDNGYSPITSYTMAPVANRFHLRLENNEEMGDEEVHTIPPELRILLDPGALPALQNPPIRGGEGQNGGLPFPFPDISRRVWNEEGEDGLPRPKDPVIPSIQLFPGLREPEEVQGSVDIALSVKCDNEKMIVAVEKDSFQASGYSGMDVTLLDPTCKAKMNGTHFVLESPLNGCGTRPRWSALDGVVYYNSIVIQVPALGDSSGWPDGYEDLESGDNGFPGDMDEGDASLFTRPEIVVFNCSLQQVRNPSSFQEQPHGNITFNMELYNTDLFLVPSQGVFSVPENGHVYVEVSVTKAEQELGFAIQTCFISPYSNPDRMSHYTIIENICPKDESVKFYSPKRVHFPIPQADMDKKRFSFVFKPVFNTSLLFLQCELTLCTKMEKHPQKLPKCVPPDEACTSLDASIIWAMMQNKKTFTKPLAVIHHEAESKEKGPSMKEPNPISPPIFHGLDTLTVMGIAFAAFVIGALLTGALWYIYSHTGETAGRQQVPTSPPASENSSAAHSIGSTQSTPCSSSSTA

SEQ ID NO: 3108 - protein, 767 aa, Homo sapiens
GPEPGALCELSPVSASHPVQALMESFTVLSGCASRGTTGLPQEVHVLNLRTAGQGPGQLQREVTLHLNPISSVHIHHKSVVFLLNSPHPLVWHLKTERLATGVSRLFLVSEGSVVQFSSANFSLTAETEERNFPHGNEHLLNWARKEYGAVTSFTELKIARNIYIKVGEDQVFPPKCNIGKNFLSLNYLAEYLQPKAAEGCVMSSQPQNEEVHIIELITPNSNPYSAFQVDITIDIRPSQEDLEVVKNLILILKCKKSVNWVIKSFDVKGSLKIIAPNSIGFGKESERSMTMTKSIRDDIPSTQGNLVKWALDNGYSPITSYTMAPVANRFHLRLENNAEEMGDEEVHTIPPELRILLDPGALPALQNPPIRGGEGQNGGLPFPFPDISRRVWNEEGEDGLPRPKDPVIPSIQLFPGLREPEEVQGSVDIALSVKCDNEKMIVAVEKDSFQASGYSGMDVTLLDPTCKAKMNGTHFVLESPLNGCGTRPRWSALDGVVYYNSIVIQVPALGDSSGWPDGYEDLESGDNGFPGDMDEGDASLFTRPEIVVFNCSLQQVRNPSSFQEQPHGNITFNMELYNTDLFLVPSQGVFSVPENGHVYVEVSVTKAEQELGFAIQTCFISPYSNPDRMSHYTIIENICPKDESVKFYSPKRVHFPIPQADMDKKRFSFVFKPVFNTSLLFLQCELTLCTKMEKHPQKLPKCVPPDEACTSLDASIIWAMMQNKKTFTKPLAVIHHEAESKEKGPSMKEPNPISPPIFHGLDTLTV

SEQ ID NO: 3109-3116 - skipped (8 entries)

SEQ ID NO: 3117 - protein, 361 aa, Homo sapiens
LSTCKTIDMELVKRKRIEAIRGQILSKLRLASPPSQGEVPPGPLPEAVLALYNSTRDRVAGESAEPEPEPEADYYAKEVTRVLMVETHNEIYDKFKQSTHSIYMFFNTSELREAVPEPVLLSRAELRLLRLKLKVEQHVELYQKYSNNSWRYLSNRLLAPSDSPEWLSFDVTGVVRQWLSRGGEIEGFRLSAHCSCDSRDNTLQVDINGFTTGRRGDLATIHGMNRPFLLLMATPLERAQHLQSSRHRRALDTNYCFSSTEKNCCVRQLYIDFRKDLGWKWIHEPKGYHANFCLGPCPYIWSLDTQYSKVLALYNQHNPGASAAPCCVPQALEPLPIVYYVGRKPKVEQLSNMIVRSCKCS

SEQ ID NO: 3118 - protein, 394 aa, Homo sapiens
LSTCSTLDMDQFMRKRIEAIRGQILSKLKLTSPPEDYPEPEEVPPEVISIYNSTRDLLQEKASRRAAACERERSDEEYYAKEVYKIDMPPFFPSENAIPPTFYRPYFRIVRFDVSAMEKNASNLVKAEFRVFRLQNPKARVPEQRIELYQILKSKDLTSPTQRYIDSKVVKTRAEGEWLSFDVTDAVHEWLHHKDRNLGFKISLHCPCCTFVPSNNYIIPNKSEELEARFAGIDGTSTYTSGDQKTIKSTRKKNSGKTPHLLLMLLPSYRLESQQTNRRKKRALDAAYCFRNVQDNCCLRPLYIDFKRDLGWKWIHEPKGYNANFCAGACPYLWSSDTQHSRVLSLYNTINPEASASPCCVSQDLEPLTILYYIGKTPKIEQLSNMIVKSCKCS

SEQ ID NO: 3119 - protein, 389 aa, Homo sapiens
LSTCTTLDFGHIKKKRVEAIRGQILSKLRLTSPPEPTVMTHVPYQVLALYNSTRELLEEMHGEREEGCTQENTESEYYAKEIHKFDMIQGLAEHNELAVCPKGITSKVFRFNVSSVEKNRTNLFRAEFRVLRVPNPSSKRNEQRIELFQILRPDEHIAKQRYIGGKNLPTRGTAEWLSFDVTDTVREWLLRRESNLGLEISIHCPCHTFQPNGDILENIHEVMEIKFKGVDNEDDHGRGDLGRLKKQKDHHNPHLILMMIPPHRLDNPGQGGQRKKRALDTNYCFRNLEENCCVRPLYIDFRQDLGWKWVHEPKGYYANFCSGPCPYLRSADTTHSTVLGLYNTLNPEASASPCCVPQDLEPLTILYYVGRTPKVEQLSNMVVKSCKCS

SEQ ID NO: 3120 - protein, 470 aa, Homo sapiens
LQCFCHLCTKDNFTCVTDGLCFVSVTETTDKVIHNSMCIAEIDLIPRDRPFVCAPSSKTGSVTTTYCCNQDHCNKIELPTTVKSSPGLGPVELAAVIAGPVCFVCISLMLMVYICHNRTVIHHRVPNEEDPSLDRPFISEGTTLKDLIYDMTTSGSGSGLPLLVQRTIARTIVLQESIGKGRFGEVWRGKWRGEEVAVKIFSSREERSWFREAEIYQTVMLRHENILGFIAADNKDNGTWTQLWLVSDYHEHGSLFDYLNRYTVTVEGMIKLALSTASGLAHLHMEIVGTQGKPAIAHRDLKSKNILVKKNGTCCIADLGLAVRHDSATDTIDIAPNHRVGTKRYMAPEVLDDSINMKHFESFKRADIYAMGLVFWEIARRCSIGGIHEDYQLPYYDLVPSDPSVEEMRKVVCEQKLRPNIPNRWQSCEALRVMAKIMRECWYANGAARLTALRIKKTLSQLSQQEGIKM

SEQ ID NO: 3121 - protein, 474 aa, Homo sapiens
LQCFCHLCTKDNFTCVTDGLCFVSVTETTDKVIHNSMCIAEIDLIPRDRPFVCAPSSKTGSVTTTYCCNQDHCNKIELPTTGPFSVKSSPGLGPVELAAVIAGPVCFVCISLMLMVYICHNRTVIHHRVPNEEDPSLDRPFISEGTTLKDLIYDMTTSGSGSGLPLLVQRTIARTIVLQESIGKGRFGEVWRGKWRGEEVAVKIFSSREERSWFREAEIYQTVMLRHENILGFIAADNKDNGTWTQLWLVSDYHEHGSLFDYLNRYTVTVEGMIKLALSTASGLAHLHMEIVGTQGKPAIAHRDLKSKNILVKKNGTCCIADLGLAVRHDSATDTIDIAPNHRVGTKRYMAPEVLDDSINMKHFESFKRADIYAMGLVFWEIARRCSIGGIHEDYQLPYYDLVPSDPSVEEMRKVVCEQKLRPNIPNRWQSCEALRVMAKIMRECWYANGAARLTALRIKKTLSQLSQQEGIKM

SEQ ID NO: 3122 - protein, 393 aa, Homo sapiens
LQCFCHLCTKDNFTCVTDGLCFVSVTETTDKVIHNSMCIAEIDLIPRDRPFVCAPSSKTGSVTTTYCCNQDHCNKIELPTTGLPLLVQRTIARTIVLQESIGKGRFGEVWRGKWRGEEVAVKIFSSREERSWFREAEIYQTVMLRHENILGFIAADNKDNGTWTQLWLVSDYHEHGSLFDYLNRYTVTVEGMIKLALSTASGLAHLHMEIVGTQGKPAIAHRDLKSKNILVKKNGTCCIADLGLAVRHDSATDTIDIAPNHRVGTKRYMAPEVLDDSINMKHFESFKRADIYAMGLVFWEIARRCSIGGIHEDYQLPYYDLVPSDPSVEEMRKVVCEQKLRPNIPNRWQSCEALRVMAKIMRECWYANGAARLTALRIKKTLSQLSQQEGIKM

SEQ ID NO: 3123 - protein, 545 aa, Homo sapiens
TIPPHVQKSVNNDMIVTDNNGAVKFPQLCKFCDVRFSTCDNQKSCMSNCSITSICEKPQEVCVAVWRKNDENITLETVCHDPKLPYHDFILEDAASPKCIMKEKKKPGETFFMCSCSSDECNDNIIFSEEYNTSNPDLLLVIFQVTGISLLPPLGVAISVIIIFYCYRVNRQQKLSSTWETGKTRKLMEFSEHCAIILEDDRSDISSTCANNINHNTELLPIELDTLVGKGRFAEVYKAKLKQNTSEQFETVAVKIFPYEEYASWKTEKDIFSDINLKHENILQFLTAEERKTELGKQYWLITAFHAKGNLQEYLTRHVISWEDLRKLGSSLARGIAHLHSDHTPCGRPKMPIVHRDLKSSNILVKNDLTCCLCDFGLSLRLDPTLSVDDLANSGQVGTARYMAPEVLESRMNLENVESFKQTDVYSMALVLWEMTSRCNAVGEVKDYEPPFGSKVREHPCVESMKDNVLRDRGRPEIPSFWLNHQGIQMVCETLTECWDHDPEARLTAQCVAERFSELEHLDRLSGRSCSEEKIPEDGSLNTTK

SEQ ID NO: 3124 - protein, 570 aa, Homo sapiens
TIPPHVQKSDVEMEAQKDEIICPSCNRTAHPLRHINNDMIVTDNNGAVKFPQLCKFCDVRFSTCDNQKSCMSNCSITSICEKPQEVCVAVWRKNDENITLETVCHDPKLPYHDFILEDAASPKCIMKEKKKPGETFFMCSCSSDECNDNIIFSEEYNTSNPDLLLVIFQVTGISLLPPLGVAISVIIIFYCYRVNRQQKLSSTWETGKTRKLMEFSEHCAIILEDDRSDISSTCANNINHNTELLPIELDTLVGKGRFAEVYKAKLKQNTSEQFETVAVKIFPYEEYASWKTEKDIFSDINLKHENILQFLTAEERKTELGKQYWLITAFHAKGNLQEYLTRHVISWEDLRKLGSSLARGIAHLHSDHTPCGRPKMPIVHRDLKSSNILVKNDLTCCLCDFGLSLRLDPTLSVDDLANSGQVGTARYMAPEVLESRMNLENVESFKQTDVYSMALVLWEMTSRCNAVGEVKDYEPPFGSKVREHPCVESMKDNVLRDRGRPEIPSFWLNHQGIQMVCETLTECWDHDPEARLTAQCVAERFSELEHLDRLSGRSCSEEKIPEDGSLNTTK

SEQ ID NO: 3125 - protein, 831 aa, Homo sapiens
GPEPGALCELSPVSASHPVQALMESFTVLSGCASRGTTGLPQEVHVLNLRTAGQGPGQLQREVTLHLNPISSVHIHHKSVVFLLNSPHPLVWHLKTERLATGVSRLFLVSEGSVVQFSSANFSLTAETEERNFPHGNEHLLNWARKEYGAVTSFTELKIARNIYIKVGEDQVFPPKCNIGKNFLSLNYLAEYLQPKAAEGCVMSSQPQNEEVHIIELITPNSNPYSAFQVDITIDIRPSQEDLEVVKNLILILKCKKSVNWVIKSFDVKGSLKIIAPNSIGFGKESERSMTMTKSIRDDIPSTQGNLVKWALDNGYSPITSYTMAPVANRFHLRLENNAEEMGDEEVHTIPPELRILLDPGALPALQNPPIRGGEGQNGGLPFPFPDISRRVWNEEGEDGLPRPKDPVIPSIQLFPGLREPEEVQGSVDIALSVKCDNEKMIVAVEKDSFQASGYSGMDVTLLDPTCKAKMNGTHFVLESPLNGCGTRPRWSALDGVVYYNSIVIQVPALGDSSGWPDGYEDLESGDNGFPGDMDEGDASLFTRPEIVVFNCSLQQVRNPSSFQEQPHGNITFNMELYNTDLFLVPSQGVFSVPENGHVYVEVSVTKAEQELGFAIQTCFISPYSNPDRMSHYTIIENICPKDESVKFYSPKRVHFPIPQADMDKKRFSFVFKPVFNTSLLFLQCELTLCTKMEKHPQKLPKCVPPDEACTSLDASIIWAMMQNKKTFTKPLAVIHHEAESKEKGPSMKEPNPISPPIFHGLDTLTVMGIAFAAFVIGALLTGALWYIYSHTGETAGRQQVPTSPPASENSSAAHSIGSTQSTPCSSSSTA

SEQ ID NO: 3126 - protein, 830 aa, Homo sapiens
GPEPGALCELSPVSASHPVQALMESFTVLSGCASRGTTGLPQEVHVLNLRTAGQGPGQLQREVTLHLNPISSVHIHHKSVVFLLNSPHPLVWHLKTERLATGVSRLFLVSEGSVVQFSSANFSLTAETEERNFPHGNEHLLNWARKEYGAVTSFTELKIARNIYIKVGEDQVFPPKCNIGKNFLSLNYLAEYLQPKAAEGCVMSSQPQNEEVHIIELITPNSNPYSAFQVDITIDIRPSQEDLEVVKNLILILKCKKSVNWVIKSFDVKGSLKIIAPNSIGFGKESERSMTMTKSIRDDIPSTQGNLVKWALDNGYSPITSYTMAPVANRFHLRLENNEEMGDEEVHTIPPELRILLDPGALPALQNPPIRGGEGQNGGLPFPFPDISRRVWNEEGEDGLPRPKDPVIPSIQLFPGLREPEEVQGSVDIALSVKCDNEKMIVAVEKDSFQASGYSGMDVTLLDPTCKAKMNGTHFVLESPLNGCGTRPRWSALDGVVYYNSIVIQVPALGDSSGWPDGYEDLESGDNGFPGDMDEGDASLFTRPEIVVFNCSLQQVRNPSSFQEQPHGNITFNMELYNTDLFLVPSQGVFSVPENGHVYVEVSVTKAEQELGFAIQTCFISPYSNPDRMSHYTIIENICPKDESVKFYSPKRVHFPIPQADMDKKRFSFVFKPVFNTSLLFLQCELTLCTKMEKHPQKLPKCVPPDEACTSLDASIIWAMMQNKKTFTKPLAVIHHEAESKEKGPSMKEPNPISPPIFHGLDTLTVMGIAFAAFVIGALLTGALWYIYSHTGETAGRQQVPTSPPASENSSAAHSIGSTQSTPCSSSSTA

SEQ ID NO: 3127-3191 - skipped (65 entries)

SEQ ID NO: 3192 - protein, 481 aa, Artificial Sequence
  source: /note="Description of Artificial Sequence: Synthetic polypeptide"
  VARIANT (330)..(330): /replace=" "
  SITE (1)..(481): /note="Variant residues given in the sequence have no preference with respect to those in the annotations for variant positions"
ASTKGPSVFPLAPSSKSTSGGTAALGCLVKDYFPEPVTVSWNSGALTSGVHTFPAVLQSSGLYSLSSVVTVPSSSLGTQTYICNVNHKPSNTKVDKRVEPKSCDKTHTCPPCPAPELLGGPSVFLFPPKPKDTLMISRTPEVTCVVVDVSHEDPEVKFNWYVDGVEVHNAKTKPREEQYNSTYRVVSVLTVLHQDWLNGKEYKCKVSNKALPAPIEKTISKAKGQPREPQVCTLPPSREEMTKNQVSLSCAVKGFYPSDIAVEWESNGQPENNYKTTPPVLDSDGSFFLVSKLTVDKSRWQQGNVFSCSVMHEALHNHYTQKSLSLSPGKGGGGSGGGGSGGGGSIPPHVQKSVNNDMIVTDNNGAVKFPQLCKFCDVRFSTCDNQKSCMSNCSITSICEKPQEVCVAVWRKNDENITLETVCHDPKLPYHDFILEDAASPKCIMKEKKKPGETFFMCSCSSDECNDNIIFSEEYNTSNPD

SEQ ID NO: 3193 - protein, 481 aa, Artificial Sequence
  source: /note="Description of Artificial Sequence: Synthetic polypeptide"
  VARIANT (330)..(330): /replace=" "
  SITE (1)..(481): /note="Variant residues given in the sequence have no preference with respect to those in the annotations for variant positions"
ASTKGPSVFPLAPSSKSTSGGTAALGCLVKDYFPEPVTVSWNSGALTSGVHTFPAVLQSSGLYSLSSVVTVPSSSLGTQTYICNVNHKPSNTKVDKRVEPKSCDKTHTCPPCPAPELLGGPSVFLFPPKPKDTLMISRTPEVTCVVVDVSHEDPEVKFNWYVDGVEVHNAKTKPREEQYNSTYRVVSVLTVLHQDWLNGKEYKCKVSNKALPAPIEKTISKAKGQPREPQVYTLPPCREEMTKNQVSLWCLVKGFYPSDIAVEWESNGQPENNYKTTPPVLDSDGSFFLYSKLTVDKSRWQQGNVFSCSVMHEALHNHYTQKSLSLSPGKGGGGSGGGGSGGGGSIPPHVQKSVNNDMIVTDNNGAVKFPQLCKFCDVRFSTCDNQKSCMSNCSITSICEKPQEVCVAVWRKNDENITLETVCHDPKLPYHDFILEDAASPKCIMKEKKKPGETFFMCSCSSDECNDNIIFSEEYNTSNPD

SEQ ID NO: 3194 - protein, 378 aa, Artificial Sequence
  source: /note="Description of Artificial Sequence: Synthetic polypeptide"
  VARIANT (227)..(227): /replace=" "
  SITE (1)..(378): /note="Variant residues given in the sequence have no preference with respect to those in the annotations for variant positions"
DKTHTCPPCPAPELLGGPSVFLFPPKPKDTLMISRTPEVTCVVVDVSHEDPEVKFNWYVDGVEVHNAKTKPREEQYNSTYRVVSVLTVLHQDWLNGKEYKCKVSNKALPAPIEKTISKAKGQPREPQVCTLPPSREEMTKNQVSLSCAVKGFYPSDIAVEWESNGQPENNYKTTPPVLDSDGSFFLVSKLTVDKSRWQQGNVFSCSVMHEALHNHYTQKSLSLSPGKGGGGSGGGGSGGGGSIPPHVQKSVNNDMIVTDNNGAVKFPQLCKFCDVRFSTCDNQKSCMSNCSITSICEKPQEVCVAVWRKNDENITLETVCHDPKLPYHDFILEDAASPKCIMKEKKKPGETFFMCSCSSDECNDNIIFSEEYNTSNPD

SEQ ID NO: 3195 - protein, 378 aa, Artificial Sequence
  source: /note="Description of Artificial Sequence: Synthetic polypeptide"
  VARIANT (227)..(227): /replace=" "
  SITE (1)..(378): /note="Variant residues given in the sequence have no preference with respect to those in the annotations for variant positions"
DKTHTCPPCPAPELLGGPSVFLFPPKPKDTLMISRTPEVTCVVVDVSHEDPEVKFNWYVDGVEVHNAKTKPREEQYNSTYRVVSVLTVLHQDWLNGKEYKCKVSNKALPAPIEKTISKAKGQPREPQVYTLPPCREEMTKNQVSLWCLVKGFYPSDIAVEWESNGQPENNYKTTPPVLDSDGSFFLYSKLTVDKSRWQQGNVFSCSVMHEALHNHYTQKSLSLSPGKGGGGSGGGGSGGGGSIPPHVQKSVNNDMIVTDNNGAVKFPQLCKFCDVRFSTCDNQKSCMSNCSITSICEKPQEVCVAVWRKNDENITLETVCHDPKLPYHDFILEDAASPKCIMKEKKKPGETFFMCSCSSDECNDNIIFSEEYNTSNPD

SEQ ID NO: 3196 - protein, 481 aa, Artificial Sequence
  source: /note="Description of Artificial Sequence: Synthetic polypeptide"
  VARIANT (481)..(481): /replace=" "
  SITE (1)..(481): /note="Variant residues given in the sequence have no preference with respect to those in the annotations for variant positions"
IPPHVQKSVNNDMIVTDNNGAVKFPQLCKFCDVRFSTCDNQKSCMSNCSITSICEKPQEVCVAVWRKNDENITLETVCHDPKLPYHDFILEDAASPKCIMKEKKKPGETFFMCSCSSDECNDNIIFSEEYNTSNPDGGGGSGGGGSGGGGSASTKGPSVFPLAPSSKSTSGGTAALGCLVKDYFPEPVTVSWNSGALTSGVHTFPAVLQSSGLYSLSSVVTVPSSSLGTQTYICNVNHKPSNTKVDKRVEPKSCDKTHTCPPCPAPELLGGPSVFLFPPKPKDTLMISRTPEVTCVVVDVSHEDPEVKFNWYVDGVEVHNAKTKPREEQYNSTYRVVSVLTVLHQDWLNGKEYKCKVSNKALPAPIEKTISKAKGQPREPQVCTLPPSREEMTKNQVSLSCAVKGFYPSDIAVEWESNGQPENNYKTTPPVLDSDGSFFLVSKLTVDKSRWQQGNVFSCSVMHEALHNHYTQKSLSLSPGK

SEQ ID NO: 3197 - protein, 481 aa, Artificial Sequence
  source: /note="Description of Artificial Sequence: Synthetic polypeptide"
  VARIANT (481)..(481): /replace=" "
  SITE (1)..(481): /note="Variant residues given in the sequence have no preference with respect to those in the annotations for variant positions"
IPPHVQKSVNNDMIVTDNNGAVKFPQLCKFCDVRFSTCDNQKSCMSNCSITSICEKPQEVCVAVWRKNDENITLETVCHDPKLPYHDFILEDAASPKCIMKEKKKPGETFFMCSCSSDECNDNIIFSEEYNTSNPDGGGGSGGGGSGGGGSASTKGPSVFPLAPSSKSTSGGTAALGCLVKDYFPEPVTVSWNSGALTSGVHTFPAVLQSSGLYSLSSVVTVPSSSLGTQTYICNVNHKPSNTKVDKRVEPKSCDKTHTCPPCPAPELLGGPSVFLFPPKPKDTLMISRTPEVTCVVVDVSHEDPEVKFNWYVDGVEVHNAKTKPREEQYNSTYRVVSVLTVLHQDWLNGKEYKCKVSNKALPAPIEKTISKAKGQPREPQVYTLPPCREEMTKNQVSLWCLVKGFYPSDIAVEWESNGQPENNYKTTPPVLDSDGSFFLYSKLTVDKSRWQQGNVFSCSVMHEALHNHYTQKSLSLSPGK

SEQ ID NO: 3198 - protein, 257 aa, Artificial Sequence
  source: /note="Description of Artificial Sequence: Synthetic polypeptide"
IPPHVQKSVNNDMIVTDNNGAVKFPQLCKFCDVRFSTCDNQKSCMSNCSITSICEKPQEVCVAVWRKNDENITLETVCHDPKLPYHDFILEDAASPKCIMKEKKKPGETFFMCSCSSDECNDNIIFSEEYNTSNPDGGGGSGGGGSGGGGSGQPKANPTVTLFPPSSEELQANKATLVCLISDFYPGAVTVAWKADGSPVKAGVETTKPSKQSNNKYAASSYLSLTPEQWKSHRSYSCQVTHEGSTVEKTVAPTECS

SEQ ID NO: 3199 - protein, 258 aa, Artificial Sequence
  source: /note="Description of Artificial Sequence: Synthetic polypeptide"
IPPHVQKSVNNDMIVTDNNGAVKFPQLCKFCDVRFSTCDNQKSCMSNCSITSICEKPQEVCVAVWRKNDENITLETVCHDPKLPYHDFILEDAASPKCIMKEKKKPGETFFMCSCSSDECNDNIIFSEEYNTSNPDGGGGSGGGGSGGGGSRTVAAPSVFIFPPSDEQLKSGTASVVCLLNNFYPREAKVQWKVDNALQSGNSQESVTEQDSKDSTYSLSSTLTLSKADYEKHKVYACEVTHQGLSSPVTKSFNRGEC

SEQ ID NO: 3200-5999 - skipped (2800 entries)

SEQ ID NO: 6000 - protein, 7 aa, Artificial Sequence
  source: /note="Description of Artificial Sequence: Synthetic peptide"
TGGYHWN

SEQ ID NO: 6001 - protein, 16 aa, Artificial Sequence
  source: /note="Description of Artificial Sequence: Synthetic peptide"
YIYSSGSTSYNPSLKS

SEQ ID NO: 6002 - protein, 8 aa, Artificial Sequence
  source: /note="Description of Artificial Sequence: Synthetic peptide"
GNWHYFDF

SEQ ID NO: 6003 - protein, 30 aa, Artificial Sequence
  source: /note="Description of Artificial Sequence: Synthetic polypeptide"
QIQLQESGPGLVKPSQSLSLTCSVTGFSIN

SEQ ID NO: 6004 - protein, 14 aa, Artificial Sequence
  source: /note="Description of Artificial Sequence: Synthetic peptide"
WIRQFPGKKLEWMG

SEQ ID NO: 6005 - protein, 32 aa, Artificial Sequence
  source: /note="Description of Artificial Sequence: Synthetic polypeptide"
RISITRDTSKNQFFLQLNSVTTEDTATYYCAR

SEQ ID NO: 6006 - protein, 11 aa, Artificial Sequence
  source: /note="Description of Artificial Sequence: Synthetic peptide"
WGQGTMVTVSS

SEQ ID NO: 6007 - protein, 7 aa, Artificial Sequence
  source: /note="Description of Artificial Sequence: Synthetic peptide"
TGGYHWN

SEQ ID NO: 6008 - protein, 16 aa, Artificial Sequence
  source: /note="Description of Artificial Sequence: Synthetic peptide"
YIYSSGTTRYNPSLKS

SEQ ID NO: 6009 - protein, 8 aa, Artificial Sequence
  source: /note="Description of Artificial Sequence: Synthetic peptide"
GNWHYFDY

SEQ ID NO: 6010 - protein, 30 aa, Artificial Sequence; identical to SEQ ID NO: 6003
  source: /note="Description of Artificial Sequence: Synthetic polypeptide"

SEQ ID NO: 6011 - protein, 14 aa, Artificial Sequence
  source: /note="Description of Artificial Sequence: Synthetic peptide"
WIRQFPGKKLEWMG

SEQ ID NO: 6012 - protein, 32 aa, Artificial Sequence
  source: /note="Description of Artificial Sequence: Synthetic polypeptide"
RISITRDTSKNQFFLQLNSVTPEDTATYYCTR

SEQ ID NO: 6013 - protein, 11 aa, Artificial Sequence
  source: /note="Description of Artificial Sequence: Synthetic peptide"
WGQGTLVAVSS

SEQ ID NO: 6014 - protein, 30 aa, Artificial Sequence
  source: /note="Description of Artificial Sequence: Synthetic polypeptide"
QIQLQESGPGLVKPSETLSLTCTVSGFSIN

SEQ ID NO: 6015 - protein, 14 aa, Artificial Sequence
  source: /note="Description of Artificial Sequence: Synthetic peptide"
WIRQPAGKGLEWIG

SEQ ID NO: 6016 - protein, 32 aa, Artificial Sequence
  source: /note="Description of Artificial Sequence: Synthetic polypeptide"
RVTMSRDTSKNQFSLKLSSVTAADTAVYYCAR

SEQ ID NO: 6017 - protein, 11 aa, Artificial Sequence
  source: /note="Description of Artificial Sequence: Synthetic peptide"
WGQGTMVTVSS

SEQ ID NO: 6018 - protein, 30 aa, Artificial Sequence
  source: /note="Description of Artificial Sequence: Synthetic polypeptide"
QIQLQESGPGLVKPSQTLSLTCTVSGFSIN

SEQ ID NO: 6019 - protein, 14 aa, Artificial Sequence
  source: /note="Description of Artificial Sequence: Synthetic peptide"
WIRQHPGKGLEWIG

SEQ ID NO: 6020 - protein, 32 aa, Artificial Sequence
  source: /note="Description of Artificial Sequence: Synthetic polypeptide"
LVTISRDTSKNQFSLKLSSVTAADTAVYYCAR

SEQ ID NO: 6021 - protein, 11 aa, Artificial Sequence
  source: /note="Description of Artificial Sequence: Synthetic peptide"
WGQGTMVTVSS

SEQ ID NO: 6022 - protein, 30 aa, Artificial Sequence
  source: /note="Description of Artificial Sequence: Synthetic polypeptide"
EIQLLESGGGLVQPGGSLRLSCAVSGFSIN

SEQ ID NO: 6023 - protein, 14 aa, Artificial Sequence
  source: /note="Description of Artificial Sequence: Synthetic peptide"
WVRQAPGKGLEWVG

SEQ ID NO: 6024 - protein, 32 aa, Artificial Sequence
  source: /note="Description of Artificial Sequence: Synthetic polypeptide"
RFTISRDTSKNTFYLQMNSLRAEDTAVYYCAR

SEQ ID NO: 6025 - protein, 11 aa, Artificial Sequence
  source: /note="Description of Artificial Sequence: Synthetic peptide"
WGQGTMVTVSS

SEQ ID NO: 6026 - protein, 30 aa, Artificial Sequence
  source: /note="Description of Artificial Sequence: Synthetic polypeptide"
QIQLVQSGAEVKKPGSSVKVSCKVSGFSIN

SEQ ID NO: 6027 - protein, 14 aa, Artificial Sequence
  source: /note="Description of Artificial Sequence: Synthetic peptide"
WVRQAPGQGLEWMG

SEQ ID NO: 6028 - protein, 32 aa, Artificial Sequence
  source: /note="Description of Artificial Sequence: Synthetic polypeptide"
RVTITRDTSTNTFYMELSSLRSEDTAVYYCAR

SEQ ID NO: 6029 - protein, 11 aa, Artificial Sequence
  source: /note="Description of Artificial Sequence: Synthetic peptide"
WGQGTMVTVSS

SEQ ID NO: 6030 - protein, 30 aa, Artificial Sequence
  source: /note="Description of Artificial Sequence: Synthetic polypeptide"
EIQLVESGGGLVQPGGSLRLSCAVSGFSIN

SEQ ID NO: 6031 - skipped

SEQ ID NO: 6032 - protein, 14 aa, Artificial Sequence
  source: /note="Description of Artificial Sequence: Synthetic peptide"
WVRQAPGKGLEWVG

SEQ ID NO: 6033 - protein, 32 aa, Artificial Sequence
  source: /note="Description of Artificial Sequence: Synthetic polypeptide"
RFTISRDTAKNSFYLQMNSLRAEDTAVYYCAR

SEQ ID NO: 6034 - protein, 11 aa, Artificial Sequence
  source: /note="Description of Artificial Sequence: Synthetic peptide"
WGQGTMVTVSS

SEQ ID NO: 6035 - protein, 30 aa, Artificial Sequence
  source: /note="Description of Artificial Sequence: Synthetic polypeptide"
QIQLVQSGAEVKKPGASVKVSCKVSGFSIN

SEQ ID NO: 6036 - protein, 14 aa, Artificial Sequence
  source: /note="Description of Artificial Sequence: Synthetic peptide"
WVRQAPGQGLEWMG

SEQ ID NO: 6037 - protein, 32 aa, Artificial Sequence
  source: /note="Description of Artificial Sequence: Synthetic polypeptide"
RVTMTRDTSTNTFYMELSSLRSEDTAVYYCAR

SEQ ID NO: 6038 - protein, 11 aa, Artificial Sequence
  source: /note="Description of Artificial Sequence: Synthetic peptide"
WGQGTMVTVSS

SEQ ID NO: 6039 - protein, 30 aa, Artificial Sequence; identical to SEQ ID NO: 6018
  source: /note="Description of Artificial Sequence: Synthetic polypeptide"

SEQ ID NO: 6040 - protein, 14 aa, Artificial Sequence
  source: /note="Description of Artificial Sequence: Synthetic peptide"
WIRQHPGKGLEWIG

SEQ ID NO: 6041 - protein, 32 aa, Artificial Sequence; identical to SEQ ID NO: 6020
  source: /note="Description of Artificial Sequence: Synthetic polypeptide"

SEQ ID NO: 6042 - protein, 11 aa, Artificial Sequence
  source: /note="Description of Artificial Sequence: Synthetic peptide"
WGQGTLVTVSS

SEQ ID NO: 6043 - protein, 30 aa, Artificial Sequence; identical to SEQ ID NO: 6014
  source: /note="Description of Artificial Sequence: Synthetic polypeptide"

SEQ ID NO: 6044 - protein, 14 aa, Artificial Sequence
  source: /note="Description of Artificial Sequence: Synthetic peptide"
WIRQPAGKGLEWIG

SEQ ID NO: 6045 - protein, 32 aa, Artificial Sequence; identical to SEQ ID NO: 6016
  source: /note="Description of Artificial Sequence: Synthetic polypeptide"

SEQ ID NO: 6046 - protein, 11 aa, Artificial Sequence
  source: /note="Description of Artificial Sequence: Synthetic peptide"
WGQGTLVTVSS

SEQ ID NO: 6047 - protein, 30 aa, Artificial Sequence; identical to SEQ ID NO: 6022
  source: /note="Description of Artificial Sequence: Synthetic polypeptide"

SEQ ID NO: 6048 - protein, 14 aa, Artificial Sequence
  source: /note="Description of Artificial Sequence: Synthetic peptide"
WVRQAPGKGLEWVG

SEQ ID NO: 6049 - protein, 32 aa, Artificial Sequence; identical to SEQ ID NO: 6024
  source: /note="Description of Artificial Sequence: Synthetic polypeptide"

SEQ ID NO: 6050 - protein, 11 aa, Artificial Sequence
  source: /note="Description of Artificial Sequence: Synthetic peptide"
WGQGTLVTVSS

SEQ ID NO: 6051 - protein, 30 aa, Artificial Sequence
  source: /note="Description of Artificial Sequence: Synthetic polypeptide"
QIQLVESGGGLVKPGGSLRLSCAVSGFSIN

SEQ ID NO: 6052 - protein, 14 aa, Artificial Sequence
  source: /note="Description of Artificial Sequence: Synthetic peptide"
WIRQAPGKGLEWVG

SEQ ID NO: 6053 - protein, 32 aa, Artificial Sequence; identical to SEQ ID NO: 6033
  source: /note="Description of Artificial Sequence: Synthetic polypeptide"

SEQ ID NO: 6054 - protein, 11 aa, Artificial Sequence
  source: /note="Description of Artificial Sequence: Synthetic peptide"
WGQGTLVTVSS

SEQ ID NO: 6055 - protein, 30 aa, Artificial Sequence; identical to SEQ ID NO: 6035
  source: /note="Description of Artificial Sequence: Synthetic polypeptide"

SEQ ID NO: 6056 - protein, 14 aa, Artificial Sequence
  source: /note="Description of Artificial Sequence: Synthetic peptide"
WVRQAPGQGLEWMG

SEQ ID NO: 6057 - protein, 32 aa, Artificial Sequence; identical to SEQ ID NO: 6037
  source: /note="Description of Artificial Sequence: Synthetic polypeptide"

SEQ ID NO: 6058 - protein, 11 aa, Artificial Sequence
  source: /note="Description of Artificial Sequence: Synthetic peptide"
WGQGTLVTVSS

SEQ ID NO: 6059 - protein, 30 aa, Artificial Sequence
  source: /note="Description of Artificial Sequence: Synthetic polypeptide"
EIQLVQSGAEVKKPGATVKISCKVSGFSIN

SEQ ID NO: 6060 - protein, 14 aa, Artificial Sequence
  source: /note="Description of Artificial Sequence: Synthetic peptide"
WVQQAPGKGLEWMG

SEQ ID NO: 6061 - protein, 32 aa, Artificial Sequence; identical to SEQ ID NO: 6028
  source: /note="Description of Artificial Sequence: Synthetic polypeptide"

SEQ ID NO: 6062 - protein, 11 aa, Artificial Sequence
  source: /note="Description of Artificial Sequence: Synthetic peptide"
WGQGTLVTVSS

SEQ ID NO: 6063 - protein, 11 aa, Artificial Sequence
  source: /note="Description of Artificial Sequence: Synthetic peptide"
SGERLSDKYVH

SEQ ID NO: 6064 - protein, 7 aa, Artificial Sequence
  source: /note="Description of Artificial Sequence: Synthetic peptide"
ENDKRPS

SEQ ID NO: 6065 - protein, 10 aa, Artificial Sequence
  source: /note="Description of Artificial Sequence: Synthetic peptide"
QAGYEADYYC

SEQ ID NO: 6066 - protein, 22 aa, Artificial Sequence
  source: /note="Description of Artificial Sequence: Synthetic peptide"
SYTLTQPPLLSVALGHKATITC

SEQ ID NO: 6067 - protein, 15 aa, Artificial Sequence
  source: /note="Description of Artificial Sequence: Synthetic peptide"
WYQQKPGRAPVMVIY

SEQ ID NO: 6068 - protein, 22 aa, Artificial Sequence
  source: /note="Description of Artificial Sequence: Synthetic peptide"
GIPDQFSGSNSGNIATLTISKA

SEQ ID NO: 6069 - protein, 10 aa, Artificial Sequence
  source: /note="Description of Artificial Sequence: Synthetic peptide"
FGSGTQLTVL

SEQ ID NO: 6070 - protein, 11 aa, Artificial Sequence
  source: /note="Description of Artificial Sequence: Synthetic peptide"
SGENLSDKYVH

SEQ ID NO: 6071 - protein, 7 aa, Artificial Sequence
  source: /note="Description of Artificial Sequence: Synthetic peptide"
ENEKRPS

SEQ ID NO: 6072 - protein, 10 aa, Artificial Sequence
  source: /note="Description of Artificial Sequence: Synthetic peptide"
HYWESINSVV

SEQ ID NO: 6073 - protein, 22 aa, Artificial Sequence
  source: /note="Description of Artificial Sequence: Synthetic peptide"
SYTLTQPPSLSVAPGQKATIIC

SEQ ID NO: 6074 - protein, 15 aa, Artificial Sequence
  source: /note="Description of Artificial Sequence: Synthetic peptide"
WYQQKPGRAPVMVIY

SEQ ID NO: 6075 - protein, 32 aa, Artificial Sequence
  source: /note="Description of Artificial Sequence: Synthetic polypeptide"
GIPDQFSGSNSGNIATLTISKAQPGSEADYYC

SEQ ID NO: 6076 - protein, 10 aa, Artificial Sequence
  source: /note="Description of Artificial Sequence: Synthetic peptide"
FGSGTHLTVL

SEQ ID NO: 6077 - protein, 22 aa, Artificial Sequence
  source: /note="Description of Artificial Sequence: Synthetic peptide"
QSVTTQPPSVSGAPGQRVTISC

SEQ ID NO: 6078 - protein, 15 aa, Artificial Sequence
  source: /note="Description of Artificial Sequence: Synthetic peptide"
WYQQLPGTAPKMLIY

SEQ ID NO: 6079 - protein, 32 aa, Artificial Sequence
  source: /note="Description of Artificial Sequence: Synthetic polypeptide"
GVPDRFSGSNSGNSASLAITGLQAEDEADYYC

SEQ ID NO: 6080 - protein, 10 aa, Artificial Sequence
  source: /note="Description of Artificial Sequence: Synthetic peptide"
FGGGTQLTVL

SEQ ID NO: 6081 - protein, 22 aa, Artificial Sequence
  source: /note="Description of Artificial Sequence: Synthetic peptide"
QSVTTQPPSASGTPGQRVTISC

SEQ ID NO: 6082 - protein, 15 aa, Artificial Sequence
  source: /note="Description of Artificial Sequence: Synthetic peptide"
WYQQLPGTAPKMLIY

SEQ ID NO: 6083 - protein, 32 aa, Artificial Sequence
  source: /note="Description of Artificial Sequence: Synthetic polypeptide"
GVPDRFSGSNSGNSASLAISGLQSEDEADYYC

SEQ ID NO: 6084 - protein, 10 aa, Artificial Sequence
  source: /note="Description of Artificial Sequence: Synthetic peptide"
FGGGTQLTVL

SEQ ID NO: 6085 - protein, 22 aa, Artificial Sequence
  source: /note="Description of Artificial Sequence: Synthetic peptide"
QSVTTQPPSASGTPGQRVTISC

SEQ ID NO: 6086 - protein, 15 aa, Artificial Sequence
  source: /note="Description of Artificial Sequence: Synthetic peptide"
WYQQLPGTAPKMLIY

SEQ ID NO: 6087 - protein, 32 aa, Artificial Sequence
  source: /note="Description of Artificial Sequence: Synthetic polypeptide"
GVPDRFSGSNSGNSASLAISGLRSEDEADYYC

SEQ ID NO: 6088 - protein, 10 aa, Artificial Sequence
  source: /note="Description of Artificial Sequence: Synthetic peptide"
FGGGTQLTVL

SEQ ID NO: 6089 - protein, 22 aa, Artificial Sequence
  source: /note="Description of Artificial Sequence: Synthetic peptide"
SSETTQPHSVSVATAQMARITC

SEQ ID NO: 6090 - protein, 15 aa, Artificial Sequence
  source: /note="Description of Artificial Sequence: Synthetic peptide"
WYQQKPGQDPVMVIY

SEQ ID NO: 6091 - protein, 32 aa, Artificial Sequence
  source: /note="Description of Artificial Sequence: Synthetic polypeptide"
GIPERFSGSNPGNTATLTISRIEAGDEADYYC

SEQ ID NO: 6092 - protein, 10 aa, Artificial Sequence
  source: /note="Description of Artificial Sequence: Synthetic peptide"
FGGGTQLTVL

SEQ ID NO: 6093 - protein, 23 aa, Artificial Sequence
  source: /note="Description of Artificial Sequence: Synthetic peptide"
DIQMTQSPSTLSASVGDRVTITC

SEQ ID NO: 6094 - protein, 15 aa, Artificial Sequence
  source: /note="Description of Artificial Sequence: Synthetic peptide"
WYQQKPGKAPKMLIY

SEQ ID NO: 6095 - protein, 32 aa, Artificial Sequence
  source: /note="Description of Artificial Sequence: Synthetic polypeptide"
GVPSRFSGSNSGNEATLTISSLQPDDFATYYC

SEQ ID NO: 6096 - protein, 10 aa, Artificial Sequence
  source: /note="Description of Artificial Sequence: Synthetic peptide"
FGQGTKVEIK

SEQ ID NO: 6097 - protein, 22 aa, Artificial Sequence
  source: /note="Description of Artificial Sequence: Synthetic peptide"
QYVLTQPPSASGTPGQRVTISC

SEQ ID NO: 6098 - protein, 15 aa, Artificial Sequence
  source: /note="Description of Artificial Sequence: Synthetic peptide"
WYQQLPGTAPKMLIY

SEQ ID NO: 6099 - protein, 32 aa, Artificial Sequence; identical to SEQ ID NO: 6083
  source: /note="Description of Artificial Sequence: Synthetic polypeptide"

SEQ ID NO: 6100 - protein, 10 aa, Artificial Sequence
  source: /note="Description of Artificial Sequence: Synthetic peptide"
FGEGTELTVL

SEQ ID NO: 6101 - protein, 22 aa, Artificial Sequence
  source: /note="Description of Artificial Sequence: Synthetic peptide"
QYVLTQPPSASGTPGQRVTISC

SEQ ID NO: 6102 - protein, 15 aa, Artificial Sequence
  source: /note="Description of Artificial Sequence: Synthetic peptide"
WYQQLPGTAPKMLIY

SEQ ID NO: 6103 - protein, 32 aa, Artificial Sequence; identical to SEQ ID NO: 6087
  source: /note="Description of Artificial Sequence: Synthetic polypeptide"

SEQ ID NO: 6104 - protein, 10 aa, Artificial Sequence
  source: /note="Description of Artificial Sequence: Synthetic peptide"
FGEGTELTVL

SEQ ID NO: 6105 - protein, 22 aa, Artificial Sequence
  source: /note="Description of Artificial Sequence: Synthetic peptide"
SYELTQPPSVSVSPGQTASITC

SEQ ID NO: 6106 - protein, 15 aa, Artificial Sequence
  source: /note="Description of Artificial Sequence: Synthetic peptide"
WYQQKPGQSPVMVIY

SEQ ID NO: 6107 - protein, 32 aa, Artificial Sequence
  source: /note="Description of Artificial Sequence: Synthetic polypeptide"
GIPERFSGSNSGNTATLTISGTQAMDEADYYC

SEQ ID NO: 6108 - protein, 10 aa, Artificial Sequence
  source: /note="Description of Artificial Sequence: Synthetic peptide"
FGEGTELTVL

SEQ ID NO: 6109 - protein, 23 aa, Artificial Sequence
  source: /note="Description of Artificial Sequence: Synthetic peptide"
DYVLTQSPLSLPVTPGEPASISC

SEQ ID NO: 6110 - protein, 15 aa, Artificial Sequence
  source: /note="Description of Artificial Sequence: Synthetic peptide"
WYLQKPGQSPQMLIY

SEQ ID NO: 6111 - protein, 32 aa, Artificial Sequence
  source: /note="Description of Artificial Sequence: Synthetic polypeptide"
GVPDRFSGSNSGNDATLKISRVEAEDVGVYYC

SEQ ID NO: 6112 - protein, 10 aa, Artificial Sequence
  source: /note="Description of Artificial Sequence: Synthetic peptide"
FGQGTKVEIK

SEQ ID NO: 6113 - protein, 23 aa, Artificial Sequence
  source: /note="Description of Artificial Sequence: Synthetic peptide"
AYQLTQSPSSLSASVGDRVTITC

SEQ ID NO: 6114 - protein, 15 aa, Artificial Sequence
  source: /note="Description of Artificial Sequence: Synthetic peptide"
WYQQKPGKAPKMLIY

SEQ ID NO: 6115 - protein, 32 aa, Artificial Sequence
  source: /note="Description of Artificial Sequence: Synthetic polypeptide"
GVPSRFSGSNSGNDATLTISSLQPEDFATYYC

SEQ ID NO: 6116 - protein, 10 aa, Artificial Sequence
  source: /note="Description of Artificial Sequence: Synthetic peptide"
FGQGTKVEIK

SEQ ID NO: 6117 - protein, 23 aa, Artificial Sequence
  source: /note="Description of Artificial Sequence: Synthetic peptide"
EYVLTQSPATLSVSPGERATLSC

SEQ ID NO: 6118 - protein, 15 aa, Artificial Sequence
  source: /note="Description of Artificial Sequence: Synthetic peptide"
WYQQKPGQAPRMLIY

SEQ ID NO: 6119 - protein, 32 aa, Artificial Sequence
  source: /note="Description of Artificial Sequence: Synthetic polypeptide"
GIPARFSGSNSGNEATLTISSLQSEDFAVYYC

SEQ ID NO: 6120 - protein, 10 aa, Artificial Sequence
  source: /note="Description of Artificial Sequence: Synthetic peptide"
FGQGTKVEIK

SEQ ID NO: 6121 - protein, 118 aa, Artificial Sequence
  source: /note="Description of Artificial Sequence: Synthetic polypeptide"
QIQLQESGPGLVKPSQSLSLTCSVTGFSINTGGYHWNWIRQFPGKKLEWMGYIYSSGSTSYNPSLKSRISITRDTSKNQFFLQLNSVTTEDTATYYCARGNWHYFDFWGQGTMVTVSS

SEQ ID NO: 6122 - protein, 118 aa, Artificial Sequence
  source: /note="Description of Artificial Sequence: Synthetic polypeptide"
QIQLQESGPGLVKPSQSLSLTCSVTGFSINTGGYHWNWIRQFPGKKLEWMGYIYSSGTTRYNPSLKSRISITRDTSKNQFFLQLNSVTPEDTATYYCTRGNWHYFDYWGQGTLVAVSS

SEQ ID NO: 6123 - protein, 118 aa, Artificial Sequence
  source: /note="Description of Artificial Sequence: Synthetic polypeptide"
QIQLQESGPGLVKPSETLSLTCTVSGFSINTGGYHWNWIRQPAGKGLEWIGYIYSSGSTSYNPSLKSRVTMSRDTSKNQFSLKLSSVTAADTAVYYCARGNWHYFDFWGQGTMVTVSS

SEQ ID NO: 6124 - protein, 118 aa, Artificial Sequence
  source: /note="Description of Artificial Sequence: Synthetic polypeptide"
QIQLQESGPGLVKPSQTLSLTCTVSGFSINTGGYHWNWIRQHPGKGLEWIGYIYSSGSTSYNPSLKSLVTISRDTSKNQFSLKLSSVTAADTAVYYCARGNWHYFDFWGQGTMVTVSS

SEQ ID NO: 6125 - protein, 118 aa, Artificial Sequence
  source: /note="Description of Artificial Sequence: Synthetic polypeptide"
EIQLLESGGGLVQPGGSLRLSCAVSGFSINTGGYHWNWVRQAPGKGLEWVGYIYSSGSTSYNPSLKSRFTISRDTSKNTFYLQMNSLRAEDTAVYYCARGNWHYFDFWGQGTMVTVSS

SEQ ID NO: 6126 - protein, 118 aa, Artificial Sequence
  source: /note="Description of Artificial Sequence: Synthetic polypeptide"
QIQLVQSGAEVKKPGSSVKVSCKVSGFSINTGGYHWNWVRQAPGQGLEWMGYIYSSGSTSYNPSLKSRVTITRDTSTNTFYMELSSLRSEDTAVYYCARGNWHYFDFWGQGTMVTVSS

SEQ ID NO: 6127 - protein, 118 aa, Artificial Sequence
  source: /note="Description of Artificial Sequence: Synthetic polypeptide"
EIQLVESGGGLVQPGGSLRLSCAVSGFSINTGGYHWNWVRQAPGKGLEWVGYIYSSGSTSYNPSLKSRFTISRDTAKNSFYLQMNSLRAEDTAVYYCARGNWHYFDFWGQGTMVTVSS

SEQ ID NO: 6128 - protein, 118 aa, Artificial Sequence
  source: /note="Description of Artificial Sequence: Synthetic polypeptide"
QIQLVQSGAEVKKPGASVKVSCKVSGFSINTGGYHWNWVRQAPGQGLEWMGYIYSSGSTSYNPSLKSRVTMTRDTSTNTFYMELSSLRSEDTAVYYCARGNWHYFDFWGQGTMVTVSS

SEQ ID NO: 6129 - protein, 118 aa, Artificial Sequence
  source: /note="Description of Artificial Sequence: Synthetic polypeptide"
QIQLQESGPGLVKPSQTLSLTCTVSGFSINTGGYHWNWIRQHPGKGLEWIGYIYSSGTTRYNPSLKSLVTISRDTSKNQFSLKLSSVTAADTAVYYCARGNWHYFDYWGQGTLVTVSS

SEQ ID NO: 6130 - protein, 118 aa, Artificial Sequence
  source: /note="Description of Artificial Sequence: Synthetic polypeptide"
QIQLQESGPGLVKPSETLSLTCTVSGFSINTGGYHWNWIRQPAGKGLEWIGYIYSSGTTRYNPSLKSRVTMSRDTSKNQFSLKLSSVTAADTAVYYCARGNWHYFDYWGQGTLVTVSS

SEQ ID NO: 6131 - protein, 118 aa, Artificial Sequence
  source: /note="Description of Artificial Sequence: Synthetic polypeptide"
EIQLLESGGGLVQPGGSLRLSCAVSGFSINTGGYHWNWVRQAPGKGLEWVGYIYSSGTTRYNPSLKSRFTISRDTSKNTFYLQMNSLRAEDTAVYYCARGNWHYFDYWGQGTLVTVSS

SEQ ID NO: 6132 - protein, 118 aa, Artificial Sequence
  source: /note="Description of Artificial Sequence: Synthetic polypeptide"
QIQLVESGGGLVKPGGSLRLSCAVSGFSINTGGYHWNWIRQAPGKGLEWVGYIYSSGTTRYNPSLKSRFTISRDTAKNSFYLQMNSLRAEDTAVYYCARGNWHYFDYWGQGTLVTVSS

SEQ ID NO: 6133 - protein, 118 aa, Artificial Sequence
  source: /note="Description of Artificial Sequence: Synthetic polypeptide"
QIQLVQSGAEVKKPGASVKVSCKVSGFSINTGGYHWNWVRQAPGQGLEWMGYIYSSGTTRYNPSLKSRVTMTRDTSTNTFYMELSSLRSEDTAVYYCARGNWHYFDYWGQGTLVTVSS

SEQ ID NO: 6134 - protein, 118 aa, Artificial Sequence
  source: /note="Description of Artificial Sequence: Synthetic polypeptide"
EIQLVQSGAEVKKPGATVKISCKVSGFSINTGGYHWNWVQQAPGKGLEWMGYIYSSGTTRYNPSLKSRVTITRDTSTNTFYMELSSLRSEDTAVYYCARGNWHYFDYWGQGTLVTVSS

SEQ ID NO: 6135 - protein, 97 aa, Artificial Sequence
  source: /note="Description of Artificial Sequence: Synthetic polypeptide"
SYTLTQPPLLSVALGHKATITCSGERLSDKYVHWYQQKPGRAPVMVIYENDKRPSGIPDQFSGSNSGNIATLTISKAQAGYEADYYCFGSGTQLTVL

SEQ ID NO: 6136 - protein, 107 aa, Artificial Sequence
  source: /note="Description of Artificial Sequence: Synthetic polypeptide"
SYTLTQPPSLSVAPGQKATIICSGENLSDKYVHWYQQKPGRAPVMVIYENEKRPSGIPDQFSGSNSGNIATLTISKAQPGSEADYYCHYWESINSVVFGSGTHLTVL

SEQ ID NO: 6137 - protein, 107 aa, Artificial Sequence
  source: /note="Description of Artificial Sequence: Synthetic polypeptide"
QSVTTQPPSVSGAPGQRVTISCSGERLSDKYVHWYQQLPGTAPKMLIYENDKRPSGVPDRFSGSNSGNSASLAITGLQAEDEADYYCQSWDSTNSAVFGGGTQLTVL

SEQ ID NO: 6138 - protein, 107 aa, Artificial Sequence
  source: /note="Description of Artificial Sequence: Synthetic polypeptide"
QSVTTQPPSASGTPGQRVTISCSGERLSDKYVHWYQQLPGTAPKMLIYENDKRPSGVPDRFSGSNSGNSASLAISGLQSEDEADYYCQSWDSTNSAVFGGGTQLTVL

SEQ ID NO: 6139 - protein, 107 aa, Artificial Sequence
  source: /note="Description of Artificial Sequence: Synthetic polypeptide"
QSVTTQPPSASGTPGQRVTISCSGERLSDKYVHWYQQLPGTAPKMLIYENDKRPSGVPDRFSGSNSGNSASLAISGLRSEDEADYYCQSWDSTNSAVFGGGTQLTVL

SEQ ID NO: 6140 - protein, 107 aa, Artificial Sequence
  source: /note="Description of Artificial Sequence: Synthetic polypeptide"
SSETTQPHSVSVATAQMARITCSGERLSDKYVHWYQQKPGQDPVMVIYENDKRPSGIPERFSGSNPGNTATLTISRIEAGDEADYYCQSWDSTNSAVFGGGTQLTVL

SEQ ID NO: 6141 - protein, 108 aa, Artificial Sequence
  source: /note="Description of Artificial Sequence: Synthetic polypeptide"
DIQMTQSPSTLSASVGDRVTITCSGERLSDKYVHWYQQKPGKAPKMLIYENDKRPSGVPSRFSGSNSGNEATLTISSLQPDDFATYYCQSWDSTNSAVFGQGTKVEIK

SEQ ID NO: 6142 - protein, 107 aa, Artificial Sequence
  source: /note="Description of Artificial Sequence: Synthetic polypeptide"
QYVLTQPPSASGTPGQRVTISCSGENLSDKYVHWYQQLPGTAPKMLIYENEKRPSGVPDRFSGSNSGNSASLAISGLQSEDEADYYCHYWESINSVVFGEGTELTVL

SEQ ID NO: 6143 - protein, 107 aa, Artificial Sequence
  source: /note="Description of Artificial Sequence: Synthetic polypeptide"
QYVLTQPPSASGTPGQRVTISCSGENLSDKYVHWYQQLPGTAPKMLIYENEKRPSGVPDRFSGSNSGNSASLAISGLRSEDEADYYCHYWESINSVVFGEGTELTVL

SEQ ID NO: 6144 - protein, 107 aa, Artificial Sequence
  source: /note="Description of Artificial Sequence: Synthetic polypeptide"
SYELTQPPSVSVSPGQTASITCSGENLSDKYVHWYQQKPGQSPVMVIYENEKRPSGIPERFSGSNSGNTATLTISGTQAMDEADYYCHYWESINSVVFGEGTELTVL

SEQ ID NO: 6145 - protein, 108 aa, Artificial Sequence
  source: /note="Description of Artificial Sequence: Synthetic polypeptide"
DYVLTQSPLSLPVTPGEPASISCSGENLSDKYVHWYLQKPGQSPQMLIYENEKRPSGVPDRFSGSNSGNDATLKISRVEAEDVGVYYCHYWESINSVVFGQGTKVEIK

SEQ ID NO: 6146 - protein, 108 aa, Artificial Sequence
  source: /note="Description of Artificial Sequence: Synthetic polypeptide"
AYQLTQSPSSLSASVGDRVTITCSGENLSDKYVHWYQQKPGKAPKMLIYENEKRPSGVPSRFSGSNSGNDATLTISSLQPEDFATYYCHYWESINSVVFGQGTKVEIK

SEQ ID NO: 6147 - protein, 108 aa, Artificial Sequence
  source: /note="Description of Artificial Sequence: Synthetic polypeptide"
EYVLTQSPATLSVSPGERATLSCSGENLSDKYVHWYQQKPGQAPRMLIYENEKRPSGIPARFSGSNSGNEATLTISSLQSEDFAVYYCHYWESINSVVFGQGTKVEIK

SEQ ID NO: 6148 - protein, 448 aa, Artificial Sequence
  source: /note="Description of Artificial Sequence: Synthetic polypeptide"
QIQLQESGPGLVKPSQSLSLTCSVTGFSINTGGYHWNWIRQFPGKKLEWMGYIYSSGSTSYNPSLKSRISITRDTSKNQFFLQLNSVTTEDTATYYCARGNWHYFDFWGQGTMVTVSSASTKGPSVFPLAPSSKSTSGGTAALGCLVKDYFPEPVTVSWNSGALTSGVHTFPAVLQSSGLYSLSSVVTVPSSSLGTQTYICNVNHKPSNTKVDKRVEPKSCDKTHTCPPCPAPELLGGPSVFLFPPKPKDTLMISRTPEVTCVVVDVSHEDPEVKFNWYVDGVEVHNAKTKPREEQYASTYRVVSVLTVLHQDWLNGKEYKCKVSNKALPAPIEKTISKAKGQPREPQVCTLPPSREEMTKNQVSLSCAVKGFYPSDIAVEWESNGQPENNYKTTPPVLDSDGSFFLVSKLTVDKSRWQQGNVFSCSVMHEALHNHYTQKSLSLSPGK

SEQ ID NO: 6149 - protein, 448 aa, Artificial Sequence
  source: /note="Description of Artificial Sequence: Synthetic polypeptide"
QIQLQESGPGLVKPSQSLSLTCSVTGFSINTGGYHWNWIRQFPGKKLEWMGYIYSSGSTSYNPSLKSRISITRDTSKNQFFLQLNSVTTEDTATYYCARGNWHYFDFWGQGTMVTVSSASTKGPSVFPLAPSSKSTSGGTAALGCLVKDYFPEPVTVSWNSGALTSGVHTFPAVLQSSGLYSLSSVVTVPSSSLGTQTYICNVNHKPSNTKVDKRVEPKSCDKTHTCPPCPAPELLGGPSVFLFPPKPKDTLMISRTPEVTCVVVDVSHEDPEVKFNWYVDGVEVHNAKTKPREEQYNSTYRVVSVLTVLHQDWLNGKEYKCKVSNKALPAPIEKTISKAKGQPREPQVCTLPPSREEMTKNQVSLSCAVKGFYPSDIAVEWESNGQPENNYKTTPPVLDSDGSFFLVSKLTVDKSRWQQGNVFSCSVMHEALHNHYTQKSLSLSPGK

SEQ ID NO: 6150 - protein, 213 aa, Artificial Sequence
  source: /note="Description of Artificial Sequence: Synthetic polypeptide"
SYTLTQPPLLSVALGHKATITCSGERLSDKYVHWYQQKPGRAPVMVIYENDKRPSGIPDQFSGSNSGNIATLTISKAQAGYEADYYCQSWDSTNSAVFGSGTQLTVLGQPKANPTVTLFPPSSEELQANKATLVCLISDFYPGAVTVAWKADGSPVKAGVETTKPSKQSNNKYAASSYLSLTPEQWKSHRSYSCQVTHEGSTVEKTVAPTECS

SEQ ID NO: 6151 - protein, 448 aa, Artificial Sequence
  source: /note="Description of Artificial Sequence: Synthetic polypeptide"
QIQLQESGPGLVKPSQSLSLTCSVTGFSINTGGYHWNWIRQFPGKKLEWMGYIYSSGTTRYNPSLKSRISITRDTSKNQFFLQLNSVTPEDTATYYCTRGNWHYFDYWGQGTLVAVSSASTKGPSVFPLAPSSKSTSGGTAALGCLVKDYFPEPVTVSWNSGALTSGVHTFPAVLQSSGLYSLSSVVTVPSSSLGTQTYICNVNHKPSNTKVDKRVEPKSCDKTHTCPPCPAPELLGGPSVFLFPPKPKDTLMISRTPEVTCVVVDVSHEDPEVKFNWYVDGVEVHNAKTKPREEQYASTYRVVSVLTVLHQDWLNGKEYKCKVSNKALPAPIEKTISKAKGQPREPQVCTLPPSREEMTKNQVSLSCAVKGFYPSDIAVEWESNGQPENNYKTTPPVLDSDGSFFLVSKLTVDKSRWQQGNVFSCSVMHEALHNHYTQKSLSLSPGK

SEQ ID NO: 6152 - protein, 448 aa, Artificial Sequence
  source: /note="Description of Artificial Sequence: Synthetic polypeptide"
QIQLQESGPGLVKPSQSLSLTCSVTGFSINTGGYHWNWIRQFPGKKLEWMGYIYSSGTTRYNPSLKSRISITRDTSKNQFFLQLNSVTPEDTATYYCTRGNWHYFDYWGQGTLVAVSSASTKGPSVFPLAPSSKSTSGGTAALGCLVKDYFPEPVTVSWNSGALTSGVHTFPAVLQSSGLYSLSSVVTVPSSSLGTQTYICNVNHKPSNTKVDKRVEPKSCDKTHTCPPCPAPELLGGPSVFLFPPKPKDTLMISRTPEVTCVVVDVSHEDPEVKFNWYVDGVEVHNAKTKPREEQYNSTYRVVSVLTVLHQDWLNGKEYKCKVSNKALPAPIEKTISKAKGQPREPQVCTLPPSREEMTKNQVSLSCAVKGFYPSDIAVEWESNGQPENNYKTTPPVLDSDGSFFLVSKLTVDKSRWQQGNVFSCSVMHEALHNHYTQKSLSLSPGK

SEQ ID NO: 6153 - protein, 213 aa, Artificial Sequence
  source: /note="Description of Artificial Sequence: Synthetic polypeptide"
SYTLTQPPSLSVAPGQKATIICSGENLSDKYVHWYQQKPGRAPVMVIYENEKRPSGIPDQFSGSNSGNIATLTISKAQPGSEADYYCHYWESINSVVFGSGTHLTVLGQPKANPTVTLFPPSSEELQANKATLVCLISDFYPGAVTVAWKADGSPVKAGVETTKPSKQSNNKYAASSYLSLTPEQWKSHRSYSCQVTHEGSTVEKTVAPTECS

SEQ ID NO: 6154 - protein, 27 aa, Artificial Sequence
  source: /note="Description of Artificial Sequence: Synthetic peptide"
  SITE (2)..(26): /note="This region may encompass 2-5 'Glu Ala Ala Ala Lys' repeating units"
AEAAAKEAAAKEAAAKEAAAKEAAAKA

SEQ ID NO: 6155-7291 - skipped (1137 entries)

SEQ ID NO: 7292 - protein, 32 aa, Artificial Sequence
  source: /note="Description of Artificial Sequence: Synthetic polypeptide"
GIPDQFSGSNSGNIATLTISKAQAGYEADYYC

SEQ ID NO: 7293 - protein, 10 aa, Artificial Sequence
  source: /note="Description of Artificial Sequence: Synthetic peptide"
QSWDSTNSAV

SEQ ID NO: 7294 - protein, 107 aa, Artificial Sequence
  source: /note="Description of Artificial Sequence: Synthetic polypeptide"
SYTLTQPPLLSVALGHKATITCSGERLSDKYVHWYQQKPGRAPVMVIYENDKRPSGIPDQFSGSNSGNIATLTISKAQAGYEADYYCQSWDSTNSAVFGSGTQLTVL

SEQ ID NO: 7295 - protein, 118 aa, Artificial Sequence
  source: /note="Description of Artificial Sequence: Synthetic polypeptide"
QIQLQESGPGLVKPSQSLSLSCSVTGFSINTGGYHWNWIRQFPGKKVEWMGYIYSSGTTKYNPSLKSRISITRDTSKNQFFLQLNSVTTEDTATYYCARGDWHYFDYWGQGTMVAVSS

SEQ ID NO: 7296 - protein, 107 aa, Artificial Sequence
  source: /note="Description of Artificial Sequence: Synthetic polypeptide"
SYTLTQPPLVSVALGQKATIICSGENLSDKYVHWYQQKPGRAPVMVIYENDKRPSGIPDQFSGSNSGNIATLTISKAQAGYEADYYCHCWDSTNSAVFGSGTHLTVL

SEQ ID NO: 7297 - protein, 118 aa, Artificial Sequence
  source: /note="Description of Artificial Sequence: Synthetic polypeptide"
QIQLQESGPGLVKPSQSLSLTCSVTGFSINTGGYHWNWIRQFPGKKLEWMGYIYSSGSTRYNPSLKSRFSITRDTSKNQFFLQLNSVTTEDTATYYCTRGNWHYFDYWGQGTLVAVSS

SEQ ID NO: 7298 - protein, 118 aa, Artificial Sequence
  source: /note="Description of Artificial Sequence: Synthetic polypeptide"
QIQLQESGPGLVKPSQSLSLSCSVTGFSITTTGYHWNWIRQFPGKKLEWMGYIYSSGSTSYNPSLKSRFSITRDTSKNQFFLQLNSVTTEDTATYYCARGDWHYFDYWGPGTMVTVSS

SEQ ID NO: 7299 - protein, 107 aa, Artificial Sequence
  source: /note="Description of Artificial Sequence: Synthetic polypeptide"
SFTLTQPPLVSVAVGQVATITCSGEKLSDKYVHWYQQKPGRAPVMVIYENDRRPSGIPDQFSGSNSGNIASLTISKAQAGDEADYFCQFWDSTNSAVFGGGTQLTVL

SEQ ID NO: 7300 - protein, 118 aa, Artificial Sequence
  source: /note="Description of Artificial Sequence: Synthetic polypeptide"
QIQLQESGPGLVKPSQTLSLTCTVSGFSITTTGYHWNWIRQHPGKGLEWIGYIYSSGSTSYNPSLKSLVTISRDTSKNQFSLKLSSVTAADTAVYYCARGDWHYFDYWGQGTMVTVSS

SEQ ID NO: 7301 - protein, 118 aa, Artificial Sequence
  source: /note="Description of Artificial Sequence: Synthetic polypeptide"
QIQLVESGGGLVKPGGSLRLSCAVSGFSITTTGYHWNWIRQAPGKGLEWVGYIYSSGSTSYNPSLKSRFTISRDTAKNSFYLQMNSLRAEDTAVYYCARGDWHYFDYWGQGTMVTVSS

SEQ ID NO: 7302 - protein, 118 aa, Artificial Sequence
  source: /note="Description of Artificial Sequence: Synthetic polypeptide"
EIQLLESGGGLVQPGGSLRLSCAVSGFSITTTGYHWNWVRQAPGKGLEWVGYIYSSGSTSYNPSLKSRFTISRDTSKNTFYLQMNSLRAEDTAVYYCARGDWHYFDYWGQGTMVTVSS

SEQ ID NO: 7303 - protein, 118 aa, Artificial Sequence
  source: /note="Description of Artificial Sequence: Synthetic polypeptide"
EIQLVESGGGLVQPGGSLRLSCAVSGFSITTTGYHWNWVRQAPGKGLEWVGYIYSSGSTSYNPSLKSRFTISRDTAKNSFYLQMNSLRAEDTAVYYCARGDWHYFDYWGQGTMVTVSS

SEQ ID NO: 7304 - protein, 118 aa, Artificial Sequence
  source: /note="Description of Artificial Sequence: Synthetic polypeptide"
QIQLVQSGAEVKKPGASVKVSCKVSGFSITTTGYHWNWVRQAPGQGLEWMGYIYSSGSTSYNPSLKSRVTMTRDTSTNTFYMELSSLRSEDTAVYYCARGDWHYFDYWGQGTMVTVSS

SEQ ID NO: 7305 - protein, 107 aa, Artificial Sequence
  source: /note="Description of Artificial Sequence: Synthetic polypeptide"
SSETTQPPSVSVSPGQTASITCSGEKLSDKYVHWYQQKPGQSPVMVIYENDRRPSGIPERFSGSNSGNTATLTISGTQAMDEADYFCQFWDSTNSAVFGGGTQLTVL

SEQ ID NO: 7306 - protein, 107 aa, Artificial Sequence
  source: /note="Description of Artificial Sequence: Synthetic polypeptide"
SSETTQPHSVSVATAQMARITCSGEKLSDKYVHWYQQKPGQDPVMVIYENDRRPSGIPERFSGSNPGNTATLTISRIEAGDEADYFCQFWDSTNSAVFGGGTQLTVL

SEQ ID NO: 7307 - protein, 107 aa, Artificial Sequence
  source: /note="Description of Artificial Sequence: Synthetic polypeptide"
QSVTTQPPSASGTPGQRVTISCSGEKLSDKYVHWYQQLPGTAPKMLIYENDRRPSGVPDRFSGSNSGNSASLAISGLRSEDEADYFCQFWDSTNSAVFGGGTQLTVL

SEQ ID NO: 7308 - protein, 107 aa, Artificial Sequence
  source: /note="Description of Artificial Sequence: Synthetic polypeptide"
QSVTTQPPSVSGAPGQRVTISCSGEKLSDKYVHWYQQLPGTAPKMLIYENDRRPSGVPDRFSGSNSGNSASLAITGLQAEDEADYFCQFWDSTNSAVFGGGTQLTVL

SEQ ID NO: 7309 - protein, 108 aa, Artificial Sequence
  source: /note="Description of Artificial Sequence: Synthetic polypeptide"
DSVTTQSPLSLPVTLGQPASISCSGEKLSDKYVHWYQQRPGQSPRMLIYENDRRPSGVPDRFSGSNSGNDATLKISRVEAEDVGVYFCQFWDSTNSAVFGGGTKVEIK

SEQ ID NO: 7310 - protein, 245 aa, Artificial Sequence
  source: /note="Description of Artificial Sequence: Synthetic polypeptide"
EIQLLESGGGLVQPGGSLRLSCAVSGFSITTTGYHWNWVRQAPGKGLEWVGYIYSSGSTSYNPSLKSRFTISRDTSKNTFYLQMNSLRAEDTAVYYCARGDWHYFDYWGQGTMVTVSSGGGGSGGGGSGGGGSGGGGSSSETTQPPSVSVSPGQTASITCSGEKLSDKYVHWYQQKPGQSPVMVIYENDRRPSGIPERFSGSNSGNTATLTISGTQAMDEADYFCQFWDSTNSAVFGGGTQLTVL

SEQ ID NO: 7311 - protein, 246 aa, Artificial Sequence
  source: /note="Description of Artificial Sequence: Synthetic polypeptide"
EIQLLESGGGLVQPGGSLRLSCAVSGFSITTTGYHWNWVRQAPGKGLEWVGYIYSSGSTSYNPSLKSRFTISRDTSKNTFYLQMNSLRAEDTAVYYCARGDWHYFDYWGQGTMVTVSSGGGGSGGGGSGGGGSGGGGSDSVTTQSPLSLPVTLGQPASISCSGEKLSDKYVHWYQQRPGQSPRMLIYENDRRPSGVPDRFSGSNSGNDATLKISRVEAEDVGVYFCQFWDSTNSAVFGGGTKVEIK

SEQ ID NO: 7312 - protein, 32 aa, Artificial Sequence
  source: /note="Description of Artificial Sequence: Synthetic polypeptide"
QIQLQESGPGLVKPSQSLSLSCSVTGFSINTG

SEQ ID NO: 7313 - protein, 5 aa, Artificial Sequence
  source: /note="Description of Artificial Sequence: Synthetic peptide"
GYHWN

SEQ ID NO: 7314 - protein, 14 aa, Artificial Sequence
  source: /note="Description of Artificial Sequence: Synthetic peptide"
WIRQFPGKKVEWMG

SEQ ID NO: 7315 - protein, 8 aa, Artificial Sequence
  source: /note="Description of Artificial Sequence: Synthetic peptide"
GDWHYFDY

SEQ ID NO: 7316 - protein, 11 aa, Artificial Sequence
  source: /note="Description of Artificial Sequence: Synthetic peptide"
WGQGTMVAVSS

SEQ ID NO: 7317 - protein, 32 aa, Artificial Sequence
  source: /note="Description of Artificial Sequence: Synthetic polypeptide"
QIQLQESGPGLVKPSQSLSLTCSVTGFSINTG

SEQ ID NO: 7318 - protein, 16 aa, Artificial Sequence
  source: /note="Description of Artificial Sequence: Synthetic peptide"
YIYSSGSTRYNPSLKS

SEQ ID NO: 7319 - protein, 32 aa, Artificial Sequence
  source: /note="Description of Artificial Sequence: Synthetic polypeptide"
RFSITRDTSKNQFFLQLNSVTTEDTATYYCTR

SEQ ID NO: 7320 - protein, 22 aa, Artificial Sequence
  source: /note="Description of Artificial Sequence: Synthetic peptide"
SYTLTQPPLVSVALGQKATIIC

SEQ ID NO: 7321 - protein, 10 aa, Artificial Sequence
  source: /note="Description of Artificial Sequence: Synthetic peptide"
HCWDSTNSAV

SEQ ID NO: 7322 - protein, 32 aa, Artificial Sequence
  source: /note="Description of Artificial Sequence: Synthetic polypeptide"
QIQLQESGPGLVKPSQSLSLSCSVTGFSITTT

SEQ ID NO: 7323 - protein, 32 aa, Artificial Sequence
  source: /note="Description of Artificial Sequence: Synthetic polypeptide"
RFSITRDTSKNQFFLQLNSVTTEDTATYYCAR

SEQ ID NO: 7324 - protein, 11 aa, Artificial Sequence
  source: /note="Description of Artificial Sequence: Synthetic peptide"
WGPGTMVTVSS

SEQ ID NO: 7325 - protein, 22 aa, Artificial Sequence
  source: /note="Description of Artificial Sequence: Synthetic peptide"
SFTLTQPPLVSVAVGQVATITC

SEQ ID NO: 7326 - protein, 11 aa, Artificial Sequence
  source: /note="Description of Artificial Sequence: Synthetic peptide"
SGEKLSDKYVH

SEQ ID NO: 7327 - protein, 7 aa, Artificial Sequence
  source: /note="Description of Artificial Sequence: Synthetic peptide"
ENDRRPS

SEQ ID NO: 7328 - protein, 32 aa, Artificial Sequence
  source: /note="Description of Artificial Sequence: Synthetic polypeptide"
GIPDQFSGSNSGNIASLTISKAQAGDEADYFC

SEQ ID NO: 7329 - protein, 10 aa, Artificial Sequence
  source: /note="Description of Artificial Sequence: Synthetic peptide"
QFWDSTNSAV

SEQ ID NO: 7330 - protein, 32 aa, Artificial Sequence
  source: /note="Description of Artificial Sequence: Synthetic polypeptide"
QIQLQESGPGLVKPSQTLSLTCTVSGFSITTT

SEQ ID NO: 7331 - protein, 32 aa, Artificial Sequence
  source: /note="Description of Artificial Sequence: Synthetic polypeptide"
QIQLVESGGGLVKPGGSLRLSCAVSGFSITTT

SEQ ID NO: 7332 - protein, 32 aa, Artificial Sequence
  source: /note="Description of Artificial Sequence: Synthetic polypeptide"
EIQLLESGGGLVQPGGSLRLSCAVSGFSITTT

SEQ ID NO: 7333 - protein, 32 aa, Artificial Sequence
  source: /note="Description of Artificial Sequence: Synthetic polypeptide"
EIQLVESGGGLVQPGGSLRLSCAVSGFSITTT

SEQ ID NO: 7334 - protein, 32 aa, Artificial Sequence
  source: /note="Description of Artificial Sequence: Synthetic polypeptide"
QIQLVQSGAEVKKPGASVKVSCKVSGFSITTT

SEQ ID NO: 7335 - protein, 22 aa, Artificial Sequence
  source: /note="Description of Artificial Sequence: Synthetic peptide"
SSETTQPPSVSVSPGQTASITC

SEQ ID NO: 7336 - protein, 32 aa, Artificial Sequence
  source: /note="Description of Artificial Sequence: Synthetic polypeptide"
GIPERFSGSNSGNTATLTISGTQAMDEADYFC

SEQ ID NO: 7337 - protein, 32 aa, Artificial Sequence
  source: /note="Description of Artificial Sequence: Synthetic polypeptide"
GIPERFSGSNPGNTATLTISRIEAGDEADYFC

SEQ ID NO: 7338 - protein, 32 aa, Artificial Sequence
  source: /note="Description of Artificial Sequence: Synthetic polypeptide"
GVPDRFSGSNSGNSASLAISGLRSEDEADYFC

SEQ ID NO: 7339 - protein, 32 aa, Artificial Sequence
  source: /note="Description of Artificial Sequence: Synthetic polypeptide"
GVPDRFSGSNSGNSASLAITGLQAEDEADYFC

SEQ ID NO: 7340 - protein, 23 aa, Artificial Sequence
  source: /note="Description of Artificial Sequence: Synthetic peptide"
DSVTTQSPLSLPVTLGQPASISC

SEQ ID NO: 7341 - protein, 15 aa, Artificial Sequence
  source: /note="Description of Artificial Sequence: Synthetic peptide"
WYQQRPGQSPRMLIY

SEQ ID NO: 7342 - protein, 32 aa, Artificial Sequence
  source: /note="Description of Artificial Sequence: Synthetic polypeptide"
GVPDRFSGSNSGNDATLKISRVEAEDVGVYFC

SEQ ID NO: 7343-7370 - skipped (28 entries)

SEQ ID NO: 7371 - protein, 32 aa, Artificial Sequence
  source: /note="Description of Artificial Sequence: Synthetic polypeptide"
QIQLQESGPGLVKPSETLSLTCTVSGFSINTG

SEQ ID NO: 7372 - protein, 32 aa, Artificial Sequence
  source: /note="Description of Artificial Sequence: Synthetic polypeptide"
QIQLQESGPGLVKPSQTLSLTCTVSGFSINTG

SEQ ID NO: 7373 - protein, 32 aa, Artificial Sequence
  source: /note="Description of Artificial Sequence: Synthetic polypeptide"
EIQLLESGGGLVQPGGSLRLSCAVSGFSINTG

SEQ ID NO: 7374 - protein, 32 aa, Artificial Sequence
  source: /note="Description of Artificial Sequence: Synthetic polypeptide"
QIQLVQSGAEVKKPGSSVKVSCKVSGFSINTG

SEQ ID NO: 7375 - protein, 32 aa, Artificial Sequence
  source: /note="Description of Artificial Sequence: Synthetic polypeptide"
EIQLVESGGGLVQPGGSLRLSCAVSGFSINTG

SEQ ID NO: 7376 - protein, 32 aa, Artificial Sequence
  source: /note="Description of Artificial Sequence: Synthetic polypeptide"
QIQLVQSGAEVKKPGASVKVSCKVSGFSINTG

SEQ ID NO: 7377 - protein, 32 aa, Artificial Sequence
  source: /note="Description of Artificial Sequence: Synthetic polypeptide"
QIQLVESGGGLVKPGGSLRLSCAVSGFSINTG

SEQ ID NO: 7378 - protein, 32 aa, Artificial Sequence
  source: /note="Description of Artificial Sequence: Synthetic polypeptide"
EIQLVQSGAEVKKPGATVKISCKVSGFSINTG

SEQ ID NO: 7379-7384 - skipped (6 entries)

SEQ ID NO: 7385 - protein, 16 aa, Artificial Sequence
  source: /note="Description of Artificial Sequence: Synthetic peptide"
YIYSSGTTKYNPSLKS
